(19) United States
(12) Patent Application Publication
(10) Pub. No.: US 2022/0233568 A1
(43) Pub. Date: Jul. 28, 2022

(54) NOVEL ARTIFICIAL NUCLEIC ACID MOLECULES

(71) Applicant: CureVac AG, Tübingen (DE)

(72) Inventors: Thomas SCHLAKE, Tübingen (DE); Andreas THESS, Tübingen (DE); Moritz THRAN, Tübingen (DE); Frédéric CHEVESSIER-TÜNNESEN, Tübingen (DE); Marion PÖNISCH, Tübingen (DE)

(21) Appl. No.: 16/757,289

(22) PCT Filed: Oct. 17, 2018
(86) PCT No.: PCT/EP2018/078453

§ 371 Date: Apr. 17, 2020

(30) Foreign Application Priority Data
Oct. 19, 2017 (EP) PCT/EP2017/076741
Oct. 19, 2017 (EP) PCT/EP2017/076775
Mar. 23, 2018 (EP) PCT/EP2018/057552
Sep. 26, 2018 (EP) PCT/EP2018/076185

(51) Int. Cl. A61K 31/7088; C12N 15/67; C07K 14/47

(52) U.S. Cl. CPC A61K 31/7088; C07K 14/47; C12N 15/67

(57) ABSTRACT

The present invention provides artificial nucleic acid molecules comprising novel combinations of 5′ and 3′ untranslated region (UTR) elements. The inventive nucleic acid molecules are preferably characterized by increased expression efficacies of coding regions operably linked to said UTR elements. The artificial nucleic acids can be used for treatment or prophylaxis of various diseases. The invention further provides (pharmaceutical) compositions, vaccines and kits comprising said artificial nucleic acid molecules. Further, in vitro methods for preparing artificial nucleic acid molecules according to the invention are provided.

[0001] This application is a national phase application under 35 U.S.C. § 371 of International Application No. PCT/EP2018/078453, filed Oct. 17, 2018, which claims benefit of International Application No. PCT/EP2018/076185, filed Sep. 26, 2018, International Application No. PCT/EP2018/057552, filed Mar. 23, 2018, International Application No. PCT/EP2017/076775, filed Oct. 19, 2017, and International Application No. PCT/EP2017/076741, filed Oct. 19, 2017, the entire contents of each of which are hereby incorporated by reference.

[0002] To date, therapeutic nucleic acids in the form of naked DNA, viral or bacterial DNA vectors are exploited for a variety of purposes. Gene therapy seeks to treat diseases by transferring one or more therapeutic nucleic acids to a patient's cells (gene addition therapy) or by correcting a defective gene (gene replacement therapy), for example by gene editing. This technology transfer holds the promise of providing lasting therapies for diseases that are not—or only temporarily—curable with conventional treatment options, and even to provide treatments for diseases previously classified as untreatable. Currently available gene therapy strategies are typically based on either in vivo gene delivery to postmitotic target cells or tissues or ex vivo gene delivery into autologous cells followed by adoptive transfer back into the patient (Kumar et al. Mol Ther Methods Clin Dev. 2016; 3: 16034). For some time, clinical gene therapy was characterized by some encouraging results, but also several setbacks. The preferred method of gene delivery, in terms of defined composition and manufacturing reproducibility, would involve naked DNA provided in a suitable carrier such as synthetic particles, for example, using lipids or polymers. However, these methods have not yet achieved efficient uptake and sustained gene expression in vivo. Thus, gene replacement therapy trials that have demonstrated some clinical benefit, relied on viral vectors for gene delivery. Among the various viral based vector systems, adeno-associated virus (AAV) DNA vectors are most commonly used for in vivo gene delivery. The use of retroviral vectors (γ-retroviral or lentivirus derived), which are capable of integrating into the target cells' genome, is somewhat hampered by safety and ethical issues. Concerns regarding retroviral gene therapy are based on the possible generation of replication competent retroviruses during vector production, mobilisation of the vector by endogenous retroviruses in genome, insertional mutagenesis leading to cancer, germline alteration and dissemination of new viruses from gene therapy patients. Although AAV-based vectors generally do not integrate into the patient's genome and thus avoid many of these potential risks, remaining concerns emanate from occasionally observed site-specific integration events, the shedding of vectors from treated patients and potential adverse effects caused by immune responses to viral structural proteins.

[0003] Immunotherapy is the second, important field of application for therapeutic nucleic acids. In particular, DNA vaccines encoding tumor antigens have been evaluated for cancer immunotherapy. In principle, harnessing the patient's own adaptive immunity to fight cancer cells seems appealing. DNA-based vaccines based on non-viral DNA vectors can generally be easily engineered and produced rapidly in large quantities. These DNA vectors are stable and can be easily stored and transported. Unlike live attenuated bacterial or viral vaccines, there is no risk of pathogenic infection or the induction of an anti-viral immune response. Naked DNA does not easily spread from cell to cell in vivo. APCs do not readily take up expressed antigens and activate satisfactory immune responses (Yang et al. Hum Vaccin Immunother. 2014 November; 10(11): 3153-3164). On the other hand, the limited uptake and consequent limited antigen-transcription by transfected cells is the major drawback of non-viral DNA-based vaccines. Indeed, anti-tumor vaccination with tumor-antigen encoding DNAs achieved some success in immunization-protection experiments, and several types of anti-cancer vaccines have been designed, manufactured, and pre-clinically tested. However, effectiveness in inducing a measurable immune response and in extending patients' overall survival has been modest in clinical trials.

[0004] Administration through electroporation or viral-mediated delivery solves the issue but opens new problems. In the case of electroporation, the availability of clinically approved devices and patients' compliance have limited their use in clinic. In the case of viral-mediated delivery, the problems are mainly related to potential dangers associated with the administration of live virus together with the presence of anti-viral neutralizing antibodies in patients (Lollini et al. Vaccines. 2015 June; 3(2): 467-489).

[0005] Since their initial development, nucleic acid-based vaccine and gene therapy technologies have come a long way. Unfortunately, when applied to human subjects inadequate uptake and transcription only achieved limited clinical success due to insufficient gene or antigen expression. Inadequate delivery of therapeutic proteins (in case of gene therapy) or immunogenicity (in case of immunotherapy) are still the biggest challenge for practical use of therapeutic DNAs. Li and Petrovsky Expert Rev Vaccines. 2016; 15(3): 313-329. Although RNA-based therapeutics overcome many of the shortcomings of therapeutic DNAs, there is still room for improvement with regard to the expression efficacies currently observed for available therapeutic RNAs. Thus, effective strategies that help enhance therapeutic nucleic acid potency are urgently needed. It is an object of the present invention to comply with the needs set out above.

[0006] Although the present invention is described in detail below, it is to be understood that this invention is not limited to the particular methodologies, protocols and reagents described herein as these may vary. It is also to be understood that the terminology used herein is not intended to limit the scope of the present invention which will be limited only by the appended claims. Unless defined otherwise, all technical and scientific terms used herein have the same meanings as commonly understood by one of ordinary skill in the art.

[0007] In the following, the elements of the present invention will be described. These elements are listed with specific embodiments, however, it should be understood that they may be combined in any manner and in any number to create additional embodiments. The variously described examples and preferred embodiments should not be construed to limit the present invention to only the explicitly described embodiments. This description should be understood to support and encompass embodiments which combine the explicitly described embodiments with any number of the disclosed and/or preferred elements. Furthermore, any permutations and combinations of all described elements in this application should be considered disclosed by the description of the present application unless the context indicates otherwise.

[0008] Throughout this specification and the claims which follow, unless the context requires otherwise, the term “comprise”, and variations such as “comprises” and “comprising”, will be understood to imply the inclusion of a stated member, integer or step but not the exclusion of any other non-stated member, integer or step. The term “consist of” is a particular embodiment of the term “comprise”, wherein any other non-stated member, integer or step is excluded. In the context of the present invention, the term “comprise” encompasses the term “consist of”. The term “comprising” thus encompasses “including” as well as “consisting” e.g., a composition “comprising” X may consist exclusively of X or may include something additional e.g., X+Y.

[0009] The terms “a” and “an” and “the” and similar reference used in the context of describing the invention (especially in the context of the claims) are to be construed to cover both the singular and the plural, unless otherwise indicated herein or clearly contradicted by context. Recitation of ranges of values herein is merely intended to serve as a shorthand method of referring individually to each separate value falling within the range. Unless otherwise indicated herein, each individual value is incorporated into the specification as if it were individually recited herein. No language in the specification should be construed as indicating any non-claimed element essential to the practice of the invention.

[0010] The word “substantially” does not exclude “completely” e.g., a composition which is “substantially free” from Y may be completely free from Y. Where necessary, the word “substantially” may be omitted from the definition of the invention.

[0011] The term “about” in relation to a numerical value x means x±1%, 2%, 3%, 4%, 5%, 6%, 7%, 8%, 9% or 10%.

[0012] In the present invention, if not otherwise indicated, different features of alternatives and embodiments may be combined with each other.

[0013] For the sake of clarity and readability the following definitions are provided. Any technical feature mentioned for these definitions may be read on each and every embodiment of the invention. Additional definitions and explanations may be specifically provided in the context of these embodiments.

### Definitions

[0014] Artificial nucleic acid molecule: An artificial nucleic acid molecule may typically be understood to be a nucleic acid molecule, e.g. a DNA or an RNA, which does not occur naturally. In other words, an artificial nucleic acid molecule may be understood as a non-natural nucleic acid molecule. Such nucleic acid molecule may be non-natural due to its individual sequence (which does not occur naturally) and/or due to other modifications, e.g. structural modifications of nucleotides, which do not occur naturally. An artificial nucleic acid molecule may be a DNA molecule, an RNA molecule or a hybrid-molecule comprising DNA and RNA portions. Typically, artificial nucleic acid molecules may be designed and/or generated by genetic engineering methods to correspond to a desired artificial sequence of nucleotides (heterologous sequence). In this context an artificial sequence is usually a sequence that may not occur naturally, i.e. it differs from the wild type sequence by at least one nucleotide. The term “wild type” may be understood as a sequence occurring in nature. Further, the term “artificial nucleic acid molecule” is not restricted to mean “one single molecule” but is, typically, understood to comprise an ensemble of identical molecules. Accordingly, it may relate to a plurality of identical molecules contained in an aliquot.

[0015] DNA: DNA is the usual abbreviation for deoxy-ribonucleic acid. It is a nucleic acid molecule, i.e. a polymer consisting of nucleotides. These nucleotides are usually deoxy-adenosine-monophosphate, deoxy-thymidine-monophosphate, deoxy-guanosine-monophosphate and deoxy-cytidine-monophosphate monomers which are—by themselves—composed of a sugar moiety (deoxyribose), a base moiety and a phosphate moiety, and polymerize by a characteristic backbone structure. The backbone structure is, typically, formed by phosphodiester bonds between the sugar moiety of the nucleotide, i.e. deoxyribose, of a first and a phosphate moiety of a second, adjacent monomer. The specific order of the monomers, i.e. the order of the bases linked to the sugar/phosphate-backbone, is called the DNA sequence. DNA may be single stranded or double stranded. In the double stranded form, the nucleotides of the first strand typically hybridize with the nucleotides of the second strand, e.g. by A/T-base-pairing and G/C-base-pairing.

[0016] Heterologous sequence: Two sequences are typically understood to be ‘heterologous’ if they are not derivable from the same gene. I.e., although heterologous sequences may be derivable from the same organism, they naturally (in nature) do not occur in the same nucleic acid molecule, such as in the same mRNA.

[0017] Cloning site: A cloning site is typically understood to be a segment of a nucleic acid molecule, which is suitable for insertion of a nucleic acid sequence, e.g., a nucleic acid sequence comprising an open reading frame. Insertion may be performed by any molecular biological method known to the one skilled in the art, e.g. by restriction and ligation. A cloning site typically comprises one or more restriction enzyme recognition sites (restriction sites). These one or more restrictions sites may be recognized by restriction enzymes which cleave the DNA at these sites. A cloning site which comprises more than one restriction site may also be termed a multiple cloning site (MCS) or a poly-linker.

[0018] Nucleic acid molecule: A nucleic acid molecule is a molecule comprising, preferably consisting of nucleic acid components. The term nucleic acid molecule preferably refers to DNA or RNA molecules. It is preferably used synonymous with the term “polynucleotide”. Preferably, a nucleic acid molecule is a polymer comprising or consisting of nucleotide monomers, which are covalently linked to each other by phosphodiester-bonds of a sugar/phosphate-backbone. The term “nucleic acid molecule” also encompasses modified nucleic acid molecules, such as base-modified, sugar-modified or backbone-modified etc. DNA or RNA molecules.

[0019] Open reading frame: An open reading frame (ORF) in the context of the invention may typically be a sequence of several nucleotide triplets, which may be translated into a peptide or protein. An open reading frame preferably contains a start codon, i.e. a combination of three subsequent nucleotides coding usually for the amino acid methionine (ATG), at its 5′-end and a subsequent region, which usually exhibits a length which is a multiple of 3 nucleotides. An ORF is preferably terminated by a stop-codon (e.g., TAA, TAG, TGA). Typically, this is the only stop-codon of the open reading frame. Thus, an open reading frame in the context of the present invention is preferably a nucleotide sequence, consisting of a number of nucleotides that may be divided by three, which starts with a start codon (e.g. ATG) and which preferably terminates with a stop codon (e.g., TAA, TGA, or TAG). The open reading frame may be isolated or it may be incorporated in a longer nucleic acid sequence, for example in a vector or an mRNA. An open reading frame may also be termed “(protein) coding sequence” or, preferably, “coding sequence”.

[0020] Peptide: A peptide or polypeptide is typically a polymer of amino acid monomers, linked by peptide bonds. It typically contains less than 50 monomer units. Nevertheless, the term peptide is not a disclaimer for molecules having more than 50 monomer units. Long peptides are also called polypeptides, typically having between 50 and 600 monomeric units.

[0021] Protein A protein typically comprises one or more peptides or polypeptides. A protein is typically folded into 3-dimensional form, which may be required for the protein to exert its biological function.

[0022] Restriction site: A restriction site, also termed restriction enzyme recognition site, is a nucleotide sequence recognized by a restriction enzyme. A restriction site is typically a short, preferably palindromic nucleotide sequence, e.g. a sequence comprising 4 to 8 nucleotides. A restriction site is preferably specifically recognized by a restriction enzyme. The restriction enzyme typically cleaves a nucleotide sequence comprising a restriction site at this site. In a double-stranded nucleotide sequence, such as a double-stranded DNA sequence, the restriction enzyme typically cuts both strands of the nucleotide sequence.

[0023] RNA, mRNA: RNA is the usual abbreviation for ribonucleic-acid. It is a nucleic acid molecule, i.e. a polymer consisting of nucleotides. These nucleotides are usually adenosine-monophosphate, uridine-monophosphate, guanosine-monophosphate and cytidine-monophosphate monomers which are connected to each other along a so-called backbone. The backbone is formed by phosphodiester bonds between the sugar, i.e. ribose, of a first and a phosphate moiety of a second, adjacent monomer. The specific succession of the monomers is called the RNA-sequence. Usually RNA may be obtainable by transcription of a DNA-sequence, e.g., inside a cell. In eukaryotic cells, transcription is typically performed inside the nucleus or the mitochondria. In vivo, transcription of DNA usually results in the so-called premature RNA which has to be processed into so-called messenger-RNA, usually abbreviated as mRNA. Processing of the premature RNA, e.g. in eukaryotic organisms, comprises a variety of different posttranscriptional-modifications such as splicing, 5′-capping, polyadenylation, export from the nucleus or the mitochondria and the like. The sum of these processes is also called maturation of RNA. The mature messenger RNA usually provides the nucleotide sequence that may be translated into an amino-acid sequence of a particular peptide or protein. Typically, a mature mRNA comprises a 5′-cap, a 5′-UTR, an open reading frame, a 3′-UTR and a poly(A) sequence. Aside from messenger RNA, several non-coding types of RNA exist which may be involved in regulation of transcription and/or translation.

[0024] Sequence of a nucleic acid molecule: The sequence of a nucleic acid molecule is typically understood to be the particular and individual order, i.e. the succession of its nucleotides. The sequence of a protein or peptide is typically understood to be the order, i.e. the succession of its amino acids.

[0025] Sequence identity: Two or more sequences are identical if they exhibit the same length and order of nucleotides or amino acids. The percentage of identity typically describes the extent to which two sequences are identical, i.e. it typically describes the percentage of nucleotides that correspond in their sequence position with identical nucleotides of a reference-sequence. For determination of the degree of identity (“% identity), the sequences to be compared are typically considered to exhibit the same length, i.e. the length of the longest sequence of the sequences to be compared. This means that a first sequence consisting of 8 nucleotides is 80% identical to a second sequence consisting of 10 nucleotides comprising the first sequence. In other words, in the context of the present invention, identity of sequences preferably relates to the percentage of nucleotides or amino acids of a sequence which have the same position in two or more sequences having the same length. Specifically, the “% identity” of two amino acid sequences or two nucleic acid sequences may be determined by aligning the sequences for optimal comparison purposes (e.g., gaps can be introduced in either sequences for best alignment with the other sequence) and comparing the amino acids or nucleotides at corresponding positions. Gaps are usually regarded as non-identical positions, irrespective of their actual position in an alignment. The “best alignment” is typically an alignment of two sequences that results in the highest percent identity. The percent identity is determined by the number of identical nucleotides in the sequences being compared (i.e., % identity=# of identical positions/total # of positions×100). The determination of percent identity between two sequences can be accomplished using a mathematical algorithm known to those of skill in the art.

[0026] Stabilized nucleic acid molecule: A stabilized nucleic acid molecule is a nucleic acid molecule, preferably a DNA or RNA molecule that is modified such, that it is more stable to disintegration or degradation, e.g., by environmental factors or enzymatic digest, such as by an exo- or endonuclease degradation, than the nucleic acid molecule without the modification. Preferably, a stabilized nucleic acid molecule in the context of the present invention is stabilized in a cell, such as a prokaryotic or eukaryotic cell, preferably in a mammalian cell, such as a human cell. The stabilization effect may also be exerted outside of cells, e.g. in a buffer solution etc., for example, in a manufacturing process for a pharmaceutical composition comprising the stabilized nucleic acid molecule.

[0027] Transfection: The term “transfection” refers to the introduction of nucleic acid molecules, such as DNA or RNA (e.g. mRNA) molecules, into cells, preferably into eukaryotic cells. In the context of the present invention, the term “transfection” encompasses any method known to the skilled person for introducing nucleic acid molecules into cells, preferably into eukaryotic cells, such as into mammalian cells. Such methods encompass, for example, electroporation, lipofection, e.g. based on cationic lipids and/or liposomes, calcium phosphate precipitation, nanoparticle based transfection, virus based transfection, or transfection based on cationic polymers, such as DEAE-dextran or polyethylenimine etc. Preferably, the introduction is non-viral.

[0028] Vector: The term “vector” refers to a nucleic acid molecule, preferably to an artificial nucleic acid molecule. A vector in the context of the present invention is suitable for incorporating or harboring a desired nucleic acid sequence, such as a nucleic acid sequence comprising an open reading frame. Such vectors may be storage vectors, expression vectors, cloning vectors, transfer vectors etc. A storage vector is a vector, which allows the convenient storage of a nucleic acid molecule, for example, of an mRNA molecule. Thus, the vector may comprise a sequence corresponding, e.g., to a desired mRNA sequence or a part thereof, such as a sequence corresponding to the coding sequence and the 3′-UTR of an mRNA. An expression vector may be used for production of expression products such as RNA, e.g. mRNA, or peptides, polypeptides or proteins. For example, an expression vector may comprise sequences needed for transcription of a sequence stretch of the vector, such as a promoter sequence, e.g. an RNA polymerase promoter sequence. A cloning vector is typically a vector that contains a cloning site, which may be used to incorporate nucleic acid sequences into the vector. A cloning vector may be, e.g., a plasmid vector or a bacteriophage vector. A transfer vector may be a vector, which is suitable for transferring nucleic acid molecules into cells or organisms, for example, viral vectors. A vector in the context of the present invention may be, e.g., an RNA vector or a DNA vector. Preferably, a vector is a DNA molecule. Preferably, a vector in the sense of the present application comprises a cloning site, a selection marker, such as an antibiotic resistance factor, and a sequence suitable for multiplication of the vector, such as an origin of replication.

[0029] Vehicle: A vehicle is typically understood to be a material that is suitable for storing, transporting, and/or administering a compound, such as a pharmaceutically active compound. For example, it may be a physiologically acceptable liquid, which is suitable for storing, transporting, and/or administering a pharmaceutically active compound.

[0030] In nature, precise control of gene expression is vital to rapidly adjust to environmental stimuli that alter the physiological status of the cell, like cellular stress or infection. Gene expression programs undergo constant regulation and are tightly regulated by multi-layered regulatory elements acting in both cis and trans. For such precise control the cellular machinery has evolved regulators at several stages from transcription to translation fine-tuning gene expression. These include structural and chemical modifications of chromosomal DNA, transcriptional regulation, post-transcriptional control of messenger RNA (mRNA), varying translational efficiency and protein turnover. These mechanisms in concert determine the spatio-temporal control of genes. Messenger RNA is composed of a protein-coding region, and 5′ and 3 untranslated regions (UTRs). The 3′ UTR is variable in sequence and size; it spans between the stop codon and the poly(A) tail. Importantly, the 3′ UTR sequence harbours several regulatory motifs that determine mRNA turnover, stability and localization, and thus governs many aspects of post-transcriptional gene regulation (Schwerk and Savan. J Immunol. 2015 Oct. 1; 195(7): 2963-2971). In gene therapy and immunotherapy applications, the tight regulation of transgene expression is of paramount importance to therapeutic safety and efficacy. Transgenes need to be expressed in optimal thresholds at the right places. However, the ability to control the level of transgene expression in order to provide a balance between therapeutic efficacy and nonspecific toxicity still remains a major challenge of present gene therapy and immunotherapy applications. The present inventors surprisingly discovered that certain combinations of 5′ and 3′-untranslated regions (UTRs) act in concert to synergistically enhance the expression of operably linked nucleic acid sequences. Artificial nucleic acid molecules harbouring the inventive UTR combinations advantageously enable the rapid and transient expression of high amounts of (poly-)peptides or proteins delivered for gene therapy or immunotherapy purposes. Furthermore, the novel nucleic acid-based therapeutics disclosed herein preferably offer additional advantages over currently available treatment options, including the reduced risk of insertional mutagenesis, and a greater efficacy of non-viral delivery and uptake. Accordingly, the artificial nucleic acids provided herein are particularly useful for various therapeutic applications in vivo, including, for instance gene therapy, cancer immunotherapy or the vaccination against infective agents.

[0031] Accordingly, in a first aspect, the present invention thus relates to an artificial nucleic acid molecule comprising at least one 5′ untranslated region (5′ UTR) element derived from a 5′ UTR of a gene selected from the group consisting of HSD17B4, ASAH1, ATP5A1, MP68, NDUFA4, NOSIP, RPL31, SLC7A3, TUBB4B and UBQLN2; at least one 3′ untranslated region (3′ UTR) element derived from a 3′ UTR of a gene selected from the group consisting of PSMB3, CASP1, COX6B1, GNAS, NDUFA1 and RPS9; and optionally at least one coding region operably linked to said 3′ UTR and said 5′ UTR.

[0032] The term “UTR” refers to an “untranslated region” located upstream (5′) and/or downstream (3′) a coding region of a nucleic acid molecule as described herein, thereby typically flanking said coding region. Accordingly, the term “UTR” generally encompasses 3′untranslated regions (“3′-UTRs”) and 5′-untranslated regions (“5′-UTRs”). UTRs may typically comprise or consist of nucleic acid sequences that are not translated into protein. Typically, UTRs comprise “regulatory elements”. The term “regulatory element” refers to a nucleic acid sequences having gene regulatory activity, the ability to affect the expression, in particular transcription or translation, of an operably (in cisor trans) linked transcribable nucleic acid sequence. The term includes promoters, enhancers, internal ribosomal entry sites (IRES), introns, leaders, transcription termination signals, such as polyadenylation signals and poly-U sequences and other expression control elements. Regulatory elements may act constitutively or in a time- and/or cell specific manner. Optionally, regulatory elements may exert their function via interacting with (e.g. recruiting and binding) of regulatory proteins capable of modulating (inducing, enhancing, reducing, abrogating, or preventing) the expression, in particular transcription of a gene. UTRs are preferably “operably linked”, i.e. placed in a functional relationship, to a coding region, preferably in a manner that allows them to control (i.e. modulate or regulate, preferably enhance) the expression of said coding sequence. A “UTR” preferably comprises or consists of a nucleic acid sequence, which is derived from the (naturally occurring, wild-type) UTR of a gene, preferably a gene as exemplified herein. The term “UTR element” as used herein typically refers to nucleic acid sequence corresponding to the shorter sub-sequence of the UTR of the parent gene (“parent” UTR). In this context, the term “corresponding to” means that the UTR element may comprise or consist of the RNA sequence transcribed from gene from which the “parent” UTR is derived (i.e. equal to the RNA sequence used for defining said “parent” UTR), or the respective DNA sequence (including sense and antisense strand, mature and immature) equivalent to said RNA sequence, or a mixture thereof.

[0033] When referring to an UTR element “derived from” the UTR of a certain gene, the UTR element may be derived from any naturally occurring homolog, variant or fragment of said gene. I.e., when referring to a UTR element “derived from” a HSD17B4 gene, the respective UTR element may consist of a nucleic acid sequence corresponding to a shorter sub-sequence of the UTR of the “parent” HSD17B4 gene, or any HSD17B4 homolog, variant or fragment (in particular including HSD17B4 homologs, variants or fragments including variations in the UTR region as compared to the “parent” HSD17B4 gene).

[0034] The term “derived from” as used throughout the present specification in the context of an artificial nucleic acid, i.e. for an artificial nucleic acid “derived from” (another) artificial nucleic acid, also means that the (artificial) nucleic acid, which is derived from (another) artificial nucleic acid, shares e.g. at least 60%, 70%, 80%, 81%, 82%, 83%, 84%, 85%, 86%, 87%, 88%, 89%, 90%, 91%, 92%, 93%, 94%, 95%, 96%, 97%, 98%, or 99% sequence identity with the nucleic acid from which it is derived. The skilled person is aware that sequence identity is typically calculated for the same types of nucleic acids, i.e. for DNA sequences or for RNA sequences. Thus, it is understood, if a DNA is “derived from” an RNA or if an RNA is “derived from” a DNA, in a first step the RNA sequence is converted into the corresponding DNA sequence (in particular by replacing the uracils (U) by thymidines (T) throughout the sequence) or, vice versa, the DNA sequence is converted into the corresponding RNA sequence (in particular by replacing the T by U throughout the sequence). Thereafter, the sequence identity of the DNA sequences or the sequence identity of the RNA sequences is determined. Preferably, a nucleic acid “derived from” a nucleic acid also refers to nucleic acid, which is modified in comparison to the nucleic acid from which it is derived, e.g. in order to increase RNA stability even further and/or to prolong and/or increase protein production. In the context of amino acid sequences (e.g. antigenic peptides or proteins) the term “derived from” means that the amino acid sequence, which is derived from (another) amino acid sequence, shares e.g. at least 60%, 70%, 75%, 80%, 81%, 82%, 83%, 84%, 85%, 86%, 87%, 88%, 89%, 90%, 91%, 92%, 93%, 94%, 95%, 96%, 97%, 98%, or 99% sequence identity with the amino acid sequence from which it is derived.

[0035] The term “homolog” in the context of genes (or nucleic acid sequences derived therefrom or comprised by said gene, like a UTR) refers to a gene (or a nucleic acid sequences derived therefrom or comprised by said gene) related to a second gene (or such nucleic acid sequence) by descent from a common ancestral DNA sequence. The term, “homolog” includes genes separated by the event of speciation (“ortholog”) and genes separated by the event of genetic duplication (“paralog”).

[0036] The term “variant” in the context of nucleic acid sequences of genes refers to nucleic acid sequence variants, i.e. nucleic acid sequences or genes comprising a nucleic acid sequence that differs in at least one nucleic acid from a reference (or “parent”) nucleic acid sequence of a reference (or “parent”) nucleic acid or gene. Variant nucleic acids or genes may thus preferably comprise, in their nucleic acid sequence, at least one mutation, substitution, insertion or deletion as compared to their respective reference sequence. Preferably, the term “variant” as used herein includes naturally occurring variants, and engineered variants of nucleic acid sequences or genes. Therefore, a “variant” as defined herein can be derived from, isolated from, related to, based on or homologous to the reference nucleic acid sequence. “Variants” may preferably have a sequence identity of at least 5%, 10%, 20%, 30%, 40%, 50%, 60%, 70%, 80%, 85%, 86%, 87%, 88%, 89%, 90%, 91%, 92%, 93%, 94%, 95%, 96%, 97%, 98%, or 99%, preferably of at least 70%, more preferably of at least 80%, even more preferably at least 85%, even more preferably of at least 90% and most preferably of at least 95% or even 97%, to a nucleic acid sequence of the respective naturally occurring (wild-type) nucleic acid sequence or gene, or a homolog, fragment or derivative thereof.

[0037] Also, the term “variant” as used throughout the present specification in the context of proteins or peptides will be recognized and understood by the person of ordinary skill in the art, and is e.g. intended to refer to a proteins or peptide variant having an amino acid sequence which differs from the original sequence in one or more mutation(s), such as one or more substituted, inserted and/or deleted amino acid(s). Preferably, these fragments and/or variants have the same biological function or specific activity compared to the full-length native protein, e.g. its specific antigenic property. “Variants” of proteins or peptides as defined herein may comprise conservative amino acid substitution(s) compared to their native, i.e. non-mutated physiological, sequence. Those amino acid sequences as well as their encoding nucleotide sequences in particular fall under the term variants as defined herein. Substitutions in which amino acids, which originate from the same class, are exchanged for one another are called conservative substitutions. In particular, these are amino acids having aliphatic side chains, positively or negatively charged side chains, aromatic groups in the side chains or amino acids, the side chains of which can enter into hydrogen bridges, e.g. side chains which have a hydroxyl function. This means that e.g. an amino acid having a polar side chain is replaced by another amino acid having a likewise polar side chain, or, e.g., an amino acid characterized by a hydrophobic side chain is substituted by another amino acid having a likewise hydrophobic side chain (e.g. serine (threonine) by threonine (serine) or leucine (isoleucine) by isoleucine (leucine)). Insertions and substitutions are possible, in particular, at those sequence positions which cause no modification to the three-dimensional structure or do not affect the binding region. Modifications to a three-dimensional structure by insertion(s) or deletion(s) can easily be determined e.g. using CD spectra (circular dichroism spectra). A “variant” of a protein or peptide may have at least 70%, 75%, 80%, 85%, 90%, 95%, 98% or 99% amino acid identity over a stretch of at least 10, 20, 30, 50, 75 or 100 amino acids of such protein or peptide. Preferably, a variant of a protein comprises a functional variant of the protein, which means that the variant exerts the same effect or functionality or at least 40%, 50%, 60%, 70%, 80%, 90%, or 95% of the effect or functionality as the protein it is derived from.

[0038] The term “fragment” in the context of nucleic acid sequences or genes refers to a continuous subsequence of the full-length reference (or “parent”) nucleic acid sequence or gene. In other words, a “fragment” may typically be a shorter portion of a full-length nucleic acid sequence or gene. Accordingly, a fragment, typically, consists of a sequence that is identical to the corresponding stretch within the full-length nucleic acid sequence or gene. The term includes naturally occurring fragments as well as engineered fragments. A preferred fragment of a sequence in the context of the present invention, consists of a continuous stretch of nucleic acids corresponding to a continuous stretch of entities in the nucleic acid or gene the fragment is derived from, which represents at least 20%, preferably at least 30%, more preferably at least 40%, more preferably at least 50%, even more preferably at least 60%, even more preferably at least 70%, and most preferably at least 80% of the total (i.e. full-length) nucleic acid sequence or gene from which the fragment is derived. A sequence identity indicated with respect to such a fragment preferably refers to the entire nucleic acid sequence or gene. Preferably, a “fragment” may comprise a nucleic acid sequence having a sequence identity of at least 5%, 10%, 20%, 30%, 40%, 50%, 60%, 70%, 80%, 85%, 86%, 87%, 88%, 89%, 90%, 91%, 92%, 93%, 94%, 95%, 96%, 97%, 98%, or 99%, preferably of at least 70%, more preferably of at least 80%, even more preferably at least 85%, even more preferably of at least 90% and most preferably of at least 95% or even 97%, to a reference nucleic acid sequence or gene that it is derived from.

[0039] UTR elements are preferably “functional”, i.e. capable of eliciting the same desired biological effect as the parent UTRs that they are derived from, i.e. in particular of modulating, controlling or regulating (inducing, enhancing, reducing, abrogating, or preventing, preferably inducing or enhancing) the expression of an operably linked coding sequence. The term “expression” as used herein generally includes all step of protein biosynthesis, inter alia transcription, mRNA processing and translation. UTR elements, in particular 3′-UTR elements and 5′UTR elements in the combinations specified herein, may for instance (typically via the action of regulatory regions comprised by said UTR elements) regulate polyadenylation, translation initiation, translation efficiency, localization, and/or stability of the nucleic acid comprising said UTR elements.

[0040] Artificial nucleic acid molecules of the invention advantageously comprise at least one 5′ UTR element and at least one 3′ UTR element, each derived from a gene selected from the groups disclosed herein. Suitable 5′ UTR elements are preferably selected from 5′-UTR elements derived from a 5′ UTR of a gene selected from the group consisting of HSD17B4, ASAH1, ATP5A1, MP68, NDUFA4, NOSIP, RPL31, SLC7A3, TUBB4B and UBQLN2, preferably as defined herein. Suitable 3′ UTR elements are preferably selected from 3′ UTR elements derived from a 3′ UTR of a gene selected from the group consisting of PSMB3, CASP1, COX6B1, GNAS, NDUFA1 and RPS9, preferably as defined herein. Further, the artificial nucleic acid molecules of the invention may optionally comprise at least one coding region operably linked to said 3′UTR element and said 5′ UTR element. Preferably, the inventive artificial nucleic acid molecules may therefore comprise, in a 5′→3′ direction, a 5′-UTR element as defined herein, operably linked to a coding region (cds) encoding a (poly-)peptide or protein of interest, and a 3′ UTR element, operably linked to said coding region:
[0041] 5′-UTR-cds-3′ UTR.

[0042] Typically, the 5′- and/or 3′-UTR elements of the inventive artificial nucleic acid molecules may be “heterologous” to the at least one coding sequence. The term “heterologous” is used herein to refer to a nucleic acid sequence that is typically derived from a different species than a reference nucleic acid sequence. A “heterologous sequence” may thus be derived from a gene that is of a different origin as compared to a reference sequence, and may typically differ, in its sequence of nucleic acids, from the reference sequence and/or may encode a different gene product.

### UTRs

### 5′ UTR

[0043] The artificial nucleic acid described herein comprises at least one 5′-UTR element derived from a 5′ UTR of a gene as indicated herein, or a homolog, variant, fragment or derivative thereof.

[0044] The term “5′-UTR” refers to a part of a nucleic acid molecule, which is located 5′ (i.e. “upstream”) of an open reading frame and which is not translated into protein. In the context of the present invention, a 5′-UTR starts with the transcriptional start site and ends one nucleotide before the start codon of the open reading frame. The 5′-UTR may comprise elements for regulating gene expression, also called “regulatory elements”. Such regulatory elements may be, for example, ribosomal binding sites. The 5′-UTR may be post-transcriptionally modified, for example by addition of a 5′-Cap. Thus, 5′-UTRs may preferably correspond to the sequence of a nucleic acid, in particular a mature mRNA, which is located between the 5′-Cap and the start codon, and more specifically to a sequence, which extends from a nucleotide located 3′ to the 5′-Cap, preferably from the nucleotide located immediately 3′ to the 5′-Cap, to a nucleotide located 5′ to the start codon of the protein coding sequence (transcriptional start site), preferably to the nucleotide located immediately 5′ to the start codon of the protein coding sequence (transcriptional start site). The nucleotide located immediately 3′ to the 5′-Cap of a mature mRNA typically corresponds to the transcriptional start site. 5′ UTRs typically have a length of less than 500, 400, 300, 250 or less than 200 nucleotides. In some embodiments its length may be in the range of at least 10, 20, 30 or 40, preferably up to 100 or 150, nucleotides.

[0045] Preferably, the at least one 5′UTR element comprises or consists of a nucleic acid sequence derived from the 5′ UTR of a chordate gene, preferably a vertebrate gene, more preferably a mammalian gene, most preferably a human gene, or from a variant of the 3′UTR of a chordate gene, preferably a vertebrate gene, more preferably a mammalian gene, most preferably a human gene.

[0046] Some of the 5′UTR elements specified herein may be derived from the 5′UTR of a TOP gene or from a homolog, variant or fragment thereof. “TOP genes” are typically characterized by the presence of a 5′terminal oligo pyrimidine tract (TOP), and further, typically by a growth-associated translational regulation. However, TOP genes with a tissue specific translational regulation are also known. mRNA that contains a 5′TOP is often referred to as TOP mRNA. Accordingly, genes that provide such messenger RNAs are referred to as TOP genes. TOP sequences have, for example, been found in genes and mRNAs encoding peptide elongation factors and ribosomal proteins. The 5′terminal oligo pyrimidine tract (“STOP” or “TOP”) is typically a stretch of pyrimidine nucleotides located in the 5′ terminal region of a nucleic acid molecule, such as the 5′ terminal region of certain mRNA molecules or the 5′ terminal region of a functional entity, e.g. the transcribed region, of certain genes. The 5′UTR of a TOP gene corresponds to the sequence of a 5′UTR of a mature mRNA derived from a TOP gene, which preferably extends from the nucleotide located 3′ to the 5′-CAP to the nucleotide located 5′ to the start codon. The TOP sequence typically starts with a cytidine, which usually corresponds to the transcriptional start site, and is followed by a stretch of usually about 3 to 30 pyrimidine nucleotides. The pyrimidine stretch and thus the 5′ TOP ends one nucleotide 5′ to the first purine nucleotide located downstream of the TOP.

[0047] A 5′UTR of a TOP gene typically does not comprise any start codons, preferably no upstream AUGs (uAUGs) or upstream open reading frames (uORFs). Therein, upstream AUGs and upstream open reading frames are typically understood to be AUGs and open reading frames that occur 5′ of the start codon (AUG) of the open reading frame that should be translated. The 5′UTRs of TOP genes are generally rather short. The lengths of 5′UTRs of TOP genes may vary between 20 nucleotides up to 500 nucleotides, and are typically less than about 200 nucleotides, preferably less than about 150 nucleotides, more preferably less than about 100 nucleotides. For example, a TOP may comprise 3, 4, 5, 6, 7, 8, 9, 10, 11, 12, 13, 14, 15, 16, 17, 18, 19, 20, 21, 22, 23, 24, 25, 26, 27, 28, 29, 30 or even more nucleotides. As used herein, the term “TOP motif” refers to a nucleic acid sequence which corresponds to a STOP as defined above. Thus, a “TOP motif” is preferably a stretch of pyrimidine nucleotides having a length of 3-30 nucleotides. Preferably, the TOP-motif consists of at least 3, preferably at least 4, more preferably at least 6, more preferably at least 7, and most preferably at least 8 pyrimidine nucleotides, wherein the stretch of pyrimidine nucleotides preferably starts at its 5′end with a cytosine nucleotide. In TOP genes and TOP mRNAs, the “TOP-motif” preferably starts at its 5′end with the transcriptional start site and ends one nucleotide 5′ to the first purine residue in said gene or mRNA. A “TOP motif” is preferably located at the 5′end of a sequence, which represents a 5′UTR, or at the 5′end of a sequence, which codes for a 5′UTR. Thus, preferably, a stretch of 3 or more pyrimidine nucleotides is called “TOP motif” if this stretch is located at the 5′end of a respective sequence, such as the artificial nucleic acid molecule, the 5′UTR element of the artificial nucleic acid molecule, or the nucleic acid sequence which is derived from the 5′UTR of a TOP gene as described herein. In other words, a stretch of 3 or more pyrimidine nucleotides, which is not located at the 5′-end of a 5′UTR or a 5′UTR element but anywhere within a 5′UTR or a 5′UTR element, is preferably not referred to as “TOP motif”.

[0048] In one embodiment, the 5′-end of an mRNA is “gggaga”.

[0049] The 5′UTR elements derived from 5′UTRs of TOP genes exemplified herein may preferably lack a TOP-motif or a 5′TOP, as defined above. Thus, the nucleic acid sequence of the 5′UTR element, which is derived from a 5′UTR of a TOP gene, may terminate at its 3′-end with a nucleotide located at position 1, 2, 3, 4, 5, 6, 7, 8, 9 or 10 upstream of the start codon (e.g. A(U/T)G) of the gene or mRNA it is derived from. Thus, the 5′UTR element does not comprise any part of the protein coding sequence. Thus, preferably, the only amino acid coding part of the artificial nucleic acid is provided by the coding sequence.

[0050] Particular 5′-UTR elements envisaged in accordance with the present invention are described in detail below.

### HSD17B4-Derived 5′ UTR Elements

[0051] Artificial nucleic acids according to the invention may comprise a 5′UTR element derived from a 5′UTR of a gene encoding a 17-beta-hydroxysteroid dehydrogenase 4, or a homolog, variant, fragment or derivative thereof, preferably lacking the 5′TOP motif.

[0052] Such 5′UTR elements preferably comprise or consist of a nucleic acid sequence which is derived from the 5′UTR of a 17-beta-hydroxysteroid dehydrogenase 4 (also referred to as peroxisomal multifunctional enzyme type 2) gene, preferably from a vertebrate, more preferably mammalian, most preferably human 17-beta-hydroxysteroid dehydrogenase 4 (HSD17B4) gene, or a homolog, variant, fragment or derivative thereof, wherein preferably the 5′UTR element does not comprise the 5′TOP of said gene. Said gene may preferably encode a 17-beta-hydroxysteroid dehydrogenase 4 protein corresponding to human 17-beta-hydroxysteroid dehydrogenase 4 (UniProt Ref. No. Q9BPX1, entry version #139 of Aug. 30, 2017), or a homolog, variant, fragment or derivative thereof.

[0053] Accordingly, artificial nucleic acids according to the invention may comprise a 5′UTR element derived from a HSD17B4 gene, in particular derived from the 5′ UTR of said HSD17B4 gene, preferably wherein said 5′UTR element comprises or consists of a DNA sequence according to SEQ ID NO: 1 or a homolog, variant, fragment or derivative thereof, in particular a DNA sequence having, in increasing order of preference, at least 5%, 10%, 20%, 30%, 40%, 50%, 60%, 70%, 80%, 85%, 86%, 87%, 88%, 89%, 90%, 91%, 92%, 93%, 94%, 95%, 96%, 97%, 98%, or 99%, preferably of at least 70%, more preferably of at least 80%, even more preferably at least 85%, even more preferably of at least 90% and most preferably of at least 95% or even 97%, sequence identity to a nucleic acid sequence according to SEQ ID NO: 1, or wherein said 5′UTR element comprises or consists of an RNA sequence according to SEQ ID NO: 2, or a or a homolog, variant, fragment or derivative thereof, in particular an RNA sequence having, in increasing order of preference, at least at least 5%, 10%, 20%, 30%, 40%, 50%, 60%, 70%, 80%, 85%, 86%, 87%, 88%, 89%, 90%, 91%, 92%, 93%, 94%, 95%, 96%, 97%, 98%, or 99%, preferably of at least 70%, more preferably of at least 80%, even more preferably at least 85%, even more preferably of at least 90% and most preferably of at least 95% or even 97%, sequence identity to a nucleic acid sequence according to SEQ ID NO: 2.

### ASAH1-Derived 5′ UTR Elements

[0054] Artificial nucleic acids according to the invention may comprise a 5′UTR element derived from a 5′UTR of a gene encoding acid ceramidase (ASAH1), or a homolog, variant, fragment or derivative thereof.

[0055] Such 5′UTR elements preferably comprise or consist of a nucleic acid sequence which is derived from the 5′UTR of an acid ceramidase (ASAH1) gene, preferably a vertebrate, more preferably mammalian, most preferably human acid ceramidase (ASAH1) gene, or a homolog, variant, fragment or derivative thereof. Said gene preferably encodes an acid ceramidase protein corresponding to human acid ceramidase (UniProt Ref. No. Q13510, entry version #177 of Jun. 7, 2017), or a homolog, variant, fragment or derivative thereof.

[0056] Accordingly, artificial nucleic acids according to the invention may comprise a 5′UTR element derived from an ASAH1 gene, in particular derived from the 5′ UTR of said ASAH1 gene, preferably wherein said 5′UTR element comprises or consists of a DNA sequence according to SEQ ID NO: 3 or a homolog, variant, fragment or derivative thereof, in particular a DNA sequence having, in increasing order of preference, at least 5%, 10%, 20%, 30%, 40%, 50%, 60%, 70%, 80%, 85%, 86%, 87%, 88%, 89%, 90%, 91%, 92%, 93%, 94%, 95%, 96%, 97%, 98%, or 99%, preferably of at least 70%, more preferably of at least 80%, even more preferably at least 85%, even more preferably of at least 90% and most preferably of at least 95% or even 97%, sequence identity to a nucleic acid sequence according to SEQ ID NO: 3, or wherein said 5′UTR element comprises or consists of an RNA sequence according to SEQ ID NO: 4, or a or a homolog, variant, fragment or derivative thereof, in particular an RNA sequence having, in increasing order of preference, at least at least 5%, 10%, 20%, 30%, 40%, 50%, 60%, 70%, 80%, 85%, 86%, 87%, 88%, 89%, 90%, 91%, 92%, 93%, 94%, 95%, 96%, 97%, 98%, or 99%, preferably of at least 70%, more preferably of at least 80%, even more preferably at least 85%, even more preferably of at least 90% and most preferably of at least 95% or even 97%, sequence identity to a nucleic acid sequence according to SEQ ID NO: 4.

### A TP5A1-Derived 5′-UTR Elements

[0057] Artificial nucleic acids according to the invention may comprise a 5′UTR element which is derived from a 5′UTR of a gene encoding mitochondrial ATP synthase subunit alpha (ATP5A1), or a homolog, variant, fragment or derivative thereof, wherein said 5′ UTR element preferably lacks the 5′TOP motif.

[0058] Such 5′UTR elements preferably comprise or consist of a nucleic acid sequence which is derived from the 5′UTR of a mitochondrial ATP synthase subunit alpha (ATP5A1) gene, preferably from a vertebrate, more preferably a mammalian and most preferably a human mitochondrial ATP synthase subunit alpha (ATP5A1) gene, or a homolog, variant, fragment or derivative thereof, wherein the 5′UTR element preferably does not comprise the 5′TOP of said gene. Said gene may preferably encode a mitochondrial ATP synthase subunit alpha protein corresponding to human acid mitochondrial ATP synthase subunit alpha (UniProt Ref. No. P25705, entry version #208 of Aug. 30, 2017), or a homolog, variant, fragment or derivative thereof.

[0059] Accordingly, artificial nucleic acids according to the invention may comprise a 5′UTR element derived from a ATP5A1 gene, in particular derived from the 5′ UTR of said ATP5A1 gene, preferably wherein said 5′UTR element comprises or consists of a DNA sequence according to SEQ ID NO: 5 or a homolog, variant, fragment or derivative thereof, in particular a DNA sequence having, in increasing order of preference, at least 5%, 10%, 20%, 30%, 40%, 50%, 60%, 70%, 80%, 85%, 86%, 87%, 88%, 89%, 90%, 91%, 92%, 93%, 94%, 95%, 96%, 97%, 98%, or 99%, preferably of at least 70%, more preferably of at least 80%, even more preferably at least 85%, even more preferably of at least 90% and most preferably of at least 95% or even 97%, sequence identity to the nucleic acid sequence according to SEQ ID NO: 5, or wherein said 5′UTR element comprises or consists of an RNA sequence according to SEQ ID NO: 6, or a homolog, variant, fragment or derivative thereof, in particular an RNA sequence having, in increasing order of preference, at least at least 5%, 10%, 20%, 30%, 40%, 50%, 60%, 70%, 80%, 85%, 86%, 87%, 88%, 89%, 90%, 91%, 92%, 93%, 94%, 95%, 96%, 97%, 98%, or 99%, preferably of at least 70%, more preferably of at least 80%, even more preferably at least 85%, even more preferably of at least 90% and most preferably of at least 95% or even 97%, sequence identity to the nucleic acid sequence according to SEQ ID NO: 6.

### MP68-Derived 5′ UTR Elements

[0060] Artificial nucleic acids according to the invention may comprise a 5′UTR element which is derived from a 5′UTR of a gene encoding MP68, or a homolog, variant, fragment or derivative thereof.

[0061] Such 5′UTR elements preferably comprise or consist of a nucleic acid sequence which is derived from the 5′UTR of a 6.8 kDa mitochondrial proteolipid (MP68) gene, preferably from a vertebrate, more preferably a mammalian and most preferably a human 6.8 kDa mitochondrial proteolipid (MP68) gene, or a homolog, variant, fragment or derivative thereof. Said gene may preferably encode a 6.8 kDa mitochondrial proteolipid (MP68) protein corresponding to human 6.8 kDa mitochondrial proteolipid (MP68) (UniProt Ref. No. P56378, entry version #127 of 15 Feb. 2017), or a homolog, variant, fragment or derivative thereof.

[0062] Accordingly, artificial nucleic acids according to the invention may comprise a 5′UTR element derived from a MP68 gene, in particular derived from the 5′ UTR of said MP68 gene, preferably wherein said 5′UTR element comprises or consists of a DNA sequence according to SEQ ID NO: 7 or a homolog, variant, fragment or derivative thereof, in particular a DNA sequence having, in increasing order of preference, at least 5%, 10%, 20%, 30%, 40%, 50%, 60%, 70%, 80%, 85%, 86%, 87%, 88%, 89%, 90%, 91%, 92%, 93%, 94%, 95%, 96%, 97%, 98%, or 99%, preferably of at least 70%, more preferably of at least 80%, even more preferably at least 85%, even more preferably of at least 90% and most preferably of at least 95% or even 97%, sequence identity to the nucleic acid sequence according to SEQ ID NO: 7, or wherein said 5′UTR element comprises or consists of an RNA sequence according to SEQ ID NO: 8, or a homolog, variant, fragment or derivative thereof, in particular an RNA sequence having, in increasing order of preference, at least at least 5%, 10%, 20%, 30%, 40%, 50%, 60%, 70%, 80%, 85%, 86%, 87%, 88%, 89%, 90%, 91%, 92%, 93%, 94%, 95%, 96%, 97%, 98%, or 99%, preferably of at least 70%, more preferably of at least 80%, even more preferably at least 85%, even more preferably of at least 90% and most preferably of at least 95% or even 97%, sequence identity to the nucleic acid sequence according to SEQ ID NO: 8.

### NDUFA4-Derived 5′-UTR Elements

[0063] Artificial nucleic acids according to the invention may comprise a 5′UTR element which is derived from a 5′UTR of a gene encoding a Cytochrome c oxidase subunit (NDUFA4), or a homolog, fragment or variant thereof.

[0064] Such 5′UTR elements preferably comprise or consist of a nucleic acid sequence which is derived from the 5′UTR of a Cytochrome c oxidase subunit (NDUFA4) gene, preferably from a vertebrate, more preferably a mammalian, most preferably a human Cytochrome c oxidase subunit (NDUFA4) gene, or a homolog, variant, fragment or derivative thereof. Said gene may preferably encode a Cytochrome c oxidase subunit (NDUFA4) protein corresponding to a human Cytochrome c oxidase subunit (NDUFA4) protein (UniProt Ref. No. 000483, entry version #149 of 30 Aug. 2017).

[0065] Accordingly, artificial nucleic acids according to the invention may comprise a 5′UTR element derived from a NDUFA4 gene, wherein said 5′UTR element comprises or consists of a DNA sequence according to SEQ ID NO: 9 or a homolog, variant, fragment or derivative thereof, in particular a DNA sequence having, in increasing order of preference, at least 5%, 10%, 20%, 30%, 40%, 50%, 60%, 70%, 80%, 85%, 86%, 87%, 88%, 89%, 90%, 91%, 92%, 93%, 94%, 95%, 96%, 97%, 98%, or 99%, preferably of at least 70%, more preferably of at least 80%, even more preferably at least 85%, even more preferably of at least 90% and most preferably of at least 95% or even 97%, sequence identity to the nucleic acid sequence according to SEQ ID NO: 9, or wherein said 5′UTR element comprises or consists of an RNA sequence according to SEQ ID NO: 10, or a homolog, variant, fragment or derivative thereof, in particular an RNA sequence having, in increasing order of preference, at least at least 5%, 10%, 20%, 30%, 40%, 50%, 60%, 70%, 80%, 85%, 86%, 87%, 88%, 89%, 90%, 91%, 92%, 93%, 94%, 95%, 96%, 97%, 98%, or 99%, preferably of at least 70%, more preferably of at least 80%, even more preferably at least 85%, even more preferably of at least 90% and most preferably of at least 95% or even 97%, sequence identity to the nucleic acid sequence according to SEQ ID NO: 10.

### NOSIP-Derived 5′ UTR Elements

[0066] Artificial nucleic acids according to the invention may comprise a 5′UTR element which is derived from a 5′UTR of a gene encoding a Nitric oxide synthase-interacting (NOSIP) protein, or a homolog, variant, fragment or derivative thereof.

[0067] Such 5′UTR elements preferably comprise or consist of a nucleic acid sequence which is derived from the 5′UTR of a Nitric oxide synthase-interacting protein (NOSIP) gene, preferably from a vertebrate, more preferably a mammalian, most preferably a human Nitric oxide synthase-interacting protein (NOSIP) gene, or a homolog, variant, fragment or derivative thereof. Said gene may preferably encode a Nitric oxide synthase-interacting protein (NOSIP) protein corresponding to a human Nitric oxide synthase-interacting protein (NOSIP) protein (UniProt Ref. No. Q9Y314, entry version #130 of 7 Jun. 2017).

[0068] Accordingly, artificial nucleic acids according to the invention may comprise a 5′UTR element derived from a NOSIP gene, wherein said 5′UTR element comprises or consists of a DNA sequence according to SEQ ID NO: 11 or a homolog, variant, fragment or derivative thereof, in particular a DNA sequence having, in increasing order of preference, at least 5%, 10%, 20%, 30%, 40%, 50%, 60%, 70%, 80%, 85%, 86%, 87%, 88%, 89%, 90%, 91%, 92%, 93%, 94%, 95%, 96%, 97%, 98%, or 99%, preferably of at least 70%, more preferably of at least 80%, even more preferably at least 85%, even more preferably of at least 90% and most preferably of at least 95% or even 97%, sequence identity to the nucleic acid sequence according to SEQ ID NO: 11, or wherein said 5′UTR element comprises or consists of an RNA sequence according to SEQ ID NO: 12, or a homolog, variant, fragment or derivative thereof, in particular an RNA sequence having, in increasing order of preference, at least at least 5%, 10%, 20%, 30%, 40%, 50%, 60%, 70%, 80%, 85%, 86%, 87%, 88%, 89%, 90%, 91%, 92%, 93%, 94%, 95%, 96%, 97%, 98%, or 99%, preferably of at least 70%, more preferably of at least 80%, even more preferably at least 85%, even more preferably of at least 90% and most preferably of at least 95% or even 97%, sequence identity to the nucleic acid sequence according to SEQ ID NO: 12.

### RPL31-Derived 5′-UTR Elements

[0069] Artificial nucleic acids according to the invention may comprise a 5′UTR element which is derived from a 5′UTR of a gene encoding a 60S ribosomal protein L31, or a homolog, variant, fragment or derivative thereof, wherein said 5′ UTR element preferably lacks the 5′TOP motif.

[0070] Such 5′UTR elements preferably comprise or consist of a nucleic acid sequence which is derived from the 5′UTR of a 60S ribosomal protein L31 (RPL31) gene, preferably from a vertebrate, more preferably a mammalian, most preferably a human 60S ribosomal protein L31 (RPL31) gene, or a homolog, variant, fragment or derivative thereof, wherein the 5′UTR element preferably does not comprise the 5′TOP of said gene. Said gene may preferably encode a 60S ribosomal protein L31 (RPL31) corresponding to a human 60S ribosomal protein L31 (RPL31) (UniProt Ref. No. P62899, entry version #138 of 30 Aug. 2017).

[0071] Accordingly, artificial nucleic acids according to the invention may comprise a 5′UTR element derived from a RPL31 gene, wherein said 5′UTR element comprises or consists of a DNA sequence according to SEQ ID NO: 13 or a homolog, variant, fragment or derivative thereof, in particular a DNA sequence having, in increasing order of preference, at least 5%, 10%, 20%, 30%, 40%, 50%, 60%, 70%, 80%, 85%, 86%, 87%, 88%, 89%, 90%, 91%, 92%, 93%, 94%, 95%, 96%, 97%, 98%, or 99%, preferably of at least 70%, more preferably of at least 80%, even more preferably at least 85%, even more preferably of at least 90% and most preferably of at least 95% or even 97%, sequence identity to the nucleic acid sequence according to SEQ ID NO: 13, or wherein said 5′UTR element comprises or consists of an RNA sequence according to SEQ ID NO: 14, or a homolog, variant, fragment or derivative thereof, in particular an RNA sequence having, in increasing order of preference, at least at least 5%, 10%, 20%, 30%, 40%, 50%, 60%, 70%, 80%, 85%, 86%, 87%, 88%, 89%, 90%, 91%, 92%, 93%, 94%, 95%, 96%, 97%, 98%, or 99%, preferably of at least 70%, more preferably of at least 80%, even more preferably at least 85%, even more preferably of at least 90% and most preferably of at least 95% or even 97%, sequence identity to the nucleic acid sequence according to SEQ ID NO: 14.

### SLC7A3-Derived 5′-UTR Elements

[0072] Artificial nucleic acids according to the invention may comprise a 5′UTR element which is derived from a 5′UTR of a gene encoding a cationic amino acid transporter 3 (solute carrier family 7 member 3, SLC7A3) protein, or a homolog, variant, fragment or derivative thereof.

[0073] Such 5′UTR elements preferably comprise or consist of a nucleic acid sequence which is derived from the 5′UTR of a cationic amino acid transporter 3 (SLC7A3) gene, preferably from a vertebrate, more preferably a mammalian, most preferably a human cationic amino acid transporter 3 (SLC7A3) gene, or a homolog, variant, fragment or derivative thereof. Said gene may preferably encode a cationic amino acid transporter 3 (SLC7A3) protein corresponding to a human cationic amino acid transporter 3 (SLC7A3) protein (UniProt Ref. No. Q8WY07, entry version #139 of 30 Aug. 2017).

[0074] Accordingly, artificial nucleic acids according to the invention may comprise a 5′UTR element derived from a SLC7A3 gene, wherein said 5′UTR element comprises or consists of a DNA sequence according to SEQ ID NO: 15 or a homolog, variant, fragment or derivative thereof, in particular a DNA sequence having, in increasing order of preference, at least 5%, 10%, 20%, 30%, 40%, 50%, 60%, 70%, 80%, 85%, 86%, 87%, 88%, 89%, 90%, 91%, 92%, 93%, 94%, 95%, 96%, 97%, 98%, or 99%, preferably of at least 70%, more preferably of at least 80%, even more preferably at least 85%, even more preferably of at least 90% and most preferably of at least 95% or even 97%, sequence identity to the nucleic acid sequence according to SEQ ID NO: 15, or wherein said 5′UTR element comprises or consists of an RNA sequence according to SEQ ID NO: 16, or a homolog, variant, fragment or derivative thereof, in particular an RNA sequence having, in increasing order of preference, at least at least 5%, 10%, 20%, 30%, 40%, 50%, 60%, 70%, 80%, 85%, 86%, 87%, 88%, 89%, 90%, 91%, 92%, 93%, 94%, 95%, 96%, 97%, 98%, or 99%, preferably of at least 70%, more preferably of at least 80%, even more preferably at least 85%, even more preferably of at least 90% and most preferably of at least 95% or even 97%, sequence identity to the nucleic acid sequence according to SEQ ID NO: 16.

### TUBB4B-Derived 5′ UTR Elements

[0075] Artificial nucleic acids according to the invention may comprise a 5′UTR element which is derived from a 5′UTR of a gene encoding a tubulin beta-4B chain (TUBB4B) protein, or a homolog, variant, fragment or derivative thereof.

[0076] Such 5′UTR elements preferably comprise or consist of a nucleic acid sequence which is derived from the 5′UTR of a tubulin beta-4B chain (TUBB4B) gene, preferably from a vertebrate, more preferably a mammalian, most preferably a human tubulin beta-4B chain (TUBB4B) gene, or a homolog, variant, fragment or derivative thereof. Said gene may preferably encode a tubulin beta-4B chain (TUBB4B) protein corresponding to a human tubulin beta-4B chain (TUBB4B) protein (UniProt Ref. No. Q8WY07, entry version #142 of 30 Aug. 2017).

[0077] Accordingly, artificial nucleic acids according to the invention may comprise a 5′UTR element derived from a tubulin beta-4B chain (TUBB4B) gene, wherein said 5′UTR element comprises or consists of a DNA sequence according to SEQ ID NO: 17 or a homolog, variant, fragment or derivative thereof, in particular a DNA sequence having, in increasing order of preference, at least 5%, 10%, 20%, 30%, 40%, 50%, 60%, 70%, 80%, 85%, 86%, 87%, 88%, 89%, 90%, 91%, 92%, 93%, 94%, 95%, 96%, 97%, 98%, or 99%, preferably of at least 70%, more preferably of at least 80%, even more preferably at least 85%, even more preferably of at least 90% and most preferably of at least 95% or even 97%, sequence identity to the nucleic acid sequence according to SEQ ID NO: 17, or wherein said 5′UTR element comprises or consists of an RNA sequence according to SEQ ID NO: 18, or a homolog, variant, fragment or derivative thereof, in particular an RNA sequence having, in increasing order of preference, at least at least 5%, 10%, 20%, 30%, 40%, 50%, 60%, 70%, 80%, 85%, 86%, 87%, 88%, 89%, 90%, 91%, 92%, 93%, 94%, 95%, 96%, 97%, 98%, or 99%, preferably of at least 70%, more preferably of at least 80%, even more preferably at least 85%, even more preferably of at least 90% and most preferably of at least 95% or even 97%, sequence identity to the nucleic acid sequence according to SEQ ID NO: 18.

### UBQLN2-Derived 5′-UTR Elements

[0078] Artificial nucleic acids according to the invention may comprise a 5′UTR element which is derived from a 5′UTR of a gene encoding an ubiquilin-2 (UBQLN2) protein, or a homolog, variant, fragment or derivative thereof.

[0079] Such 5′UTR elements preferably comprise or consist of a nucleic acid sequence which is derived from the 5′UTR of a ubiquilin-2 (UBQLN2) gene, preferably from a vertebrate, more preferably a mammalian, most preferably a human ubiquilin-2 (UBQLN2) gene, or a homolog, variant, fragment or derivative thereof. Said gene may preferably encode an ubiquilin-2 (UBQLN2) protein corresponding to a human ubiquilin-2 (UBQLN2) protein (UniProt Ref. No. Q9UHD9, entry version #151 of 30 Aug. 2017).

[0080] Accordingly, artificial nucleic acids according to the invention may comprise a 5′UTR element derived from a ubiquilin-2 (UBQLN2) gene, wherein said 5′UTR element comprises or consists of a DNA sequence according to SEQ ID NO: 19 or a homolog, variant, fragment or derivative thereof, in particular a DNA sequence having, in increasing order of preference, at least 5%, 10%, 20%, 30%, 40%, 50%, 60%, 70%, 80%, 85%, 86%, 87%, 88%, 89%, 90%, 91%, 92%, 93%, 94%, 95%, 96%, 97%, 98%, or 99%, preferably of at least 70%, more preferably of at least 80%, even more preferably at least 85%, even more preferably of at least 90% and most preferably of at least 95% or even 97%, sequence identity to the nucleic acid sequence according to SEQ ID NO: 19, or wherein said 5′UTR element comprises or consists of an RNA sequence according to SEQ ID NO: 20, or a homolog, variant, fragment or derivative thereof, in particular an RNA sequence having, in increasing order of preference, at least at least 5%, 10%, 20%, 30%, 40%, 50%, 60%, 70%, 80%, 85%, 86%, 87%, 88%, 89%, 90%, 91%, 92%, 93%, 94%, 95%, 96%, 97%, 98%, or 99%, preferably of at least 70%, more preferably of at least 80%, even more preferably at least 85%, even more preferably of at least 90% and most preferably of at least 95% or even 97%, sequence identity to the nucleic acid sequence according to SEQ ID NO: 20.

### 3′ UTR

[0081] The artificial nucleic acid described herein further comprises at least one 3′-UTR element derived from a 3′ UTR of a gene as defined herein, or a homolog, variant or fragment of said gene. The term “3′-UTR” refers to a part of a nucleic acid molecule, which is located 3′ (i.e. “downstream”) of an open reading frame and which is not translated into protein. In the context of the present invention, a 3′-UTR corresponds to a sequence which is located between the stop codon of the protein coding sequence, preferably immediately 3′ to the stop codon of the protein coding sequence, and the poly(A) sequence of the artificial nucleic acid (RNA) molecule.

[0082] Preferably, the at least one 3′UTR element comprises or consists of a nucleic acid sequence derived from the 3′UTR of a chordate gene, preferably a vertebrate gene, more preferably a murine gene, even more preferably a mammalian gene, most preferably a human gene, or from a variant of the 3′UTR of a chordate gene, preferably a vertebrate gene, more preferably a murine gene, even more preferably a mammalian gene, most preferably a human gene.

### PSMB3-Derived 3′-UTR Elements

[0083] Artificial nucleic acids according to the invention may comprise a 3′UTR element which is derived from a 3′UTR of a gene encoding a proteasome subunit beta type-3 (PSMB3) protein, or a homolog, variant, fragment or derivative thereof.

[0084] Such 3′UTR elements preferably comprises or consists of a nucleic acid sequence which is derived from the 3′UTR of a proteasome subunit beta type-3 (PSMB3) gene, preferably from a vertebrate, more preferably a mammalian, most preferably a human proteasome subunit beta type-3 (PSMB3) gene, or a homolog, variant, fragment or derivative thereof.

[0085] Said gene may preferably encode a proteasome subunit beta type-3 (PSMB3) protein corresponding to a human proteasome subunit beta type-3 (PSMB3) protein (UniProt Ref. No. P49720, entry version #183 of 30 Aug. 2017).

[0086] Accordingly, artificial nucleic acids according to the invention may comprise a 3′UTR element derived from a PSMB3 gene, wherein said 3′UTR element comprises or consists of a DNA sequence according to SEQ ID NO: 23 or a homolog, variant, fragment or derivative thereof, in particular a DNA sequence having, in increasing order of preference, at least 5%, 10%, 20%, 30%, 40%, 50%, 60%, 70%, 80%, 85%, 86%, 87%, 88%, 89%, 90%, 91%, 92%, 93%, 94%, 95%, 96%, 97%, 98%, or 99%, preferably of at least 70%, more preferably of at least 80%, even more preferably at least 85%, even more preferably of at least 90% and most preferably of at least 95% or even 97%, sequence identity to the nucleic acid sequence according to SEQ ID NO: 23, or wherein said 3′UTR element comprises or consists of an RNA sequence according to SEQ ID NO: 24, or a homolog, variant, fragment or derivative thereof, in particular an RNA sequence having, in increasing order of preference, at least at least 5%, 10%, 20%, 30%, 40%, 50%, 60%, 70%, 80%, 85%, 86%, 87%, 88%, 89%, 90%, 91%, 92%, 93%, 94%, 95%, 96%, 97%, 98%, or 99%, preferably of at least 70%, more preferably of at least 80%, even more preferably at least 85%, even more preferably of at least 90% and most preferably of at least 95% or even 97%, sequence identity to the nucleic acid sequence according to SEQ ID NO: 24.

### CASP1-Derived 3′-UTR Elements

[0087] Artificial nucleic acids according to the invention may comprise a 3′UTR element which is derived from a 3′UTR of a gene encoding a Caspase-1 (CASP1) protein, or a homolog, variant, fragment or derivative thereof.

[0088] Such 3′UTR elements preferably comprises or consists of a nucleic acid sequence which is derived from the 3′UTR of a Caspase-1 (CASP1) gene, preferably from a vertebrate, more preferably a mammalian, most preferably a human Caspase-1 (CASP1) gene, or a homolog, variant, fragment or derivative thereof.

[0089] Accordingly, artificial nucleic acids according to the invention may comprise a 3′UTR element derived from a CASP1 gene, wherein said 3′UTR element comprises or consists of a DNA sequence according to SEQ ID NO: 25 or a homolog, variant, fragment or derivative thereof, in particular a DNA sequence having, in increasing order of preference, at least 5%, 10%, 20%, 30%, 40%, 50%, 60%, 70%, 80%, 85%, 86%, 87%, 88%, 89%, 90%, 91%, 92%, 93%, 94%, 95%, 96%, 97%, 98%, or 99%, preferably of at least 70%, more preferably of at least 80%, even more preferably at least 85%, even more preferably of at least 90% and most preferably of at least 95% or even 97%, sequence identity to the nucleic acid sequence according to SEQ ID NO: 25, or wherein said 3′UTR element comprises or consists of an RNA sequence according to SEQ ID NO: 26, or a homolog, variant, fragment or derivative thereof, in particular an RNA sequence having, in increasing order of preference, at least at least 5%, 10%, 20%, 30%, 40%, 50%, 60%, 70%, 80%, 85%, 86%, 87%, 88%, 89%, 90%, 91%, 92%, 93%, 94%, 95%, 96%, 97%, 98%, or 99%, preferably of at least 70%, more preferably of at least 80%, even more preferably at least 85%, even more preferably of at least 90% and most preferably of at least 95% or even 97%, sequence identity to the nucleic acid sequence according to SEQ ID NO: 26.

### COX6B1-Derived 3′-UTR Elements

[0090] Artificial nucleic acids according to the invention may comprise a 3′UTR element which is derived from a 3′UTR of a COX6B1 gene encoding a cytochrome c oxidase subunit 6B1 (COX6B1) protein, or a homolog, variant, fragment or derivative thereof.

[0091] Such 3′UTR elements preferably comprises or consists of a nucleic acid sequence which is derived from the 3′UTR of a cytochrome c oxidase subunit 6B1 (COX6B1) gene, preferably from a vertebrate, more preferably a mammalian, most preferably a human cytochrome c oxidase subunit 6B1 (COX6B1) gene, or a homolog, variant, fragment or derivative thereof. Said gene may preferably encode a cytochrome c oxidase subunit 6B1 (COX6B1) protein corresponding to a human cytochrome c oxidase subunit 6B1 (COX6B1) protein (UniProt Ref. No. P14854, entry version #166 of 30 Aug. 2017).

[0092] Accordingly, artificial nucleic acids according to the invention may comprise a 3′UTR element derived from a COX6B1 gene, wherein said 3′UTR element comprises or consists of a DNA sequence according to SEQ ID NO: 27 or a homolog, variant, fragment or derivative thereof, in particular a DNA sequence having, in increasing order of preference, at least 5%, 10%, 20%, 30%, 40%, 50%, 60%, 70%, 80%, 85%, 86%, 87%, 88%, 89%, 90%, 91%, 92%, 93%, 94%, 95%, 96%, 97%, 98%, or 99%, preferably of at least 70%, more preferably of at least 80%, even more preferably at least 85%, even more preferably of at least 90% and most preferably of at least 95% or even 97%, sequence identity to the nucleic acid sequence according to SEQ ID NO: 27, or wherein said 3′UTR element comprises or consists of an RNA sequence according to SEQ ID NO: 28, or a homolog, variant, fragment or derivative thereof, in particular an RNA sequence having, in increasing order of preference, at least at least 5%, 10%, 20%, 30%, 40%, 50%, 60%, 70%, 80%, 85%, 86%, 87%, 88%, 89%, 90%, 91%, 92%, 93%, 94%, 95%, 96%, 97%, 98%, or 99%, preferably of at least 70%, more preferably of at least 80%, even more preferably at least 85%, even more preferably of at least 90% and most preferably of at least 95% or even 97%, sequence identity to the nucleic acid sequence according to SEQ ID NO: 28.

### GNAS-Derived 3′-UTR Elements

[0093] Artificial nucleic acids according to the invention may comprise a 3′UTR element derived from a 3′UTR of a gene encoding a Guanine nucleotide-binding protein G(s) subunit alpha isoforms short (GNAS) protein, or a homolog, variant, fragment or derivative thereof.

[0094] Such 3′UTR elements preferably comprises or consists of a nucleic acid sequence which is derived from the 3′UTR of a Guanine nucleotide-binding protein G(s) subunit alpha isoforms short (GNAS) gene, preferably from a vertebrate, more preferably a mammalian, most preferably a human Guanine nucleotide-binding protein G(s) subunit alpha isoforms short (GNAS) gene, or a homolog, variant, fragment or derivative thereof. Said gene may preferably encode a Guanine nucleotide-binding protein G(s) subunit alpha isoforms short (GNAS) protein corresponding to a human Guanine nucleotide-binding protein G(s) subunit alpha isoforms short (GNAS) protein (UniProt Ref. No. P63092, entry version #153 of 30 Aug. 2017).

[0095] Accordingly, artificial nucleic acids according to the invention may comprise a 3′ UTR element derived from a GNAS gene, wherein said 3′UTR element comprises or consists of a DNA sequence according to SEQ ID NO: 29 or a homolog, variant, fragment or derivative thereof, in particular a DNA sequence having, in increasing order of preference, at least 5%, 10%, 20%, 30%, 40%, 50%, 60%, 70%, 80%, 85%, 86%, 87%, 88%, 89%, 90%, 91%, 92%, 93%, 94%, 95%, 96%, 97%, 98%, or 99%, preferably of at least 70%, more preferably of at least 80%, even more preferably at least 85%, even more preferably of at least 90% and most preferably of at least 95% or even 97%, sequence identity to the nucleic acid sequence according to SEQ ID NO: 29, or wherein said 3′UTR element comprises or consists of an RNA sequence according to SEQ ID NO: 30, or a homolog, variant, fragment or derivative thereof, in particular an RNA sequence having, in increasing order of preference, at least at least 5%, 10%, 20%, 30%, 40%, 50%, 60%, 70%, 80%, 85%, 86%, 87%, 88%, 89%, 90%, 91%, 92%, 93%, 94%, 95%, 96%, 97%, 98%, or 99%, preferably of at least 70%, more preferably of at least 80%, even more preferably at least 85%, even more preferably of at least 90% and most preferably of at least 95% or even 97%, sequence identity to the nucleic acid sequence according to SEQ ID NO: 30.

### NDUFA1-Derived 3′ UTR Elements

[0096] Artificial nucleic acids according to the invention may comprise a 3′UTR element which is derived from a 3′UTR of a gene encoding a NADH dehydrogenase [ubiquinone] 1 alpha subcomplex subunit 1 (NDUFA1) protein, or a homolog, variant, fragment or derivative thereof.

[0097] Such 3′UTR elements preferably comprises or consists of a nucleic acid sequence which is derived from the 3′UTR of a NADH dehydrogenase [ubiquinone] 1 alpha subcomplex subunit 1 (NDUFA1) gene, preferably from a vertebrate, more preferably a mammalian, most preferably a human NADH dehydrogenase [ubiquinone] 1 alpha subcomplex subunit 1 (NDUFA1) gene, or a homolog, variant, fragment or derivative thereof. Said gene may preferably encode a NADH dehydrogenase [ubiquinone] 1 alpha subcomplex subunit 1 (NDUFA1) protein corresponding to a human NADH dehydrogenase [ubiquinone] 1 alpha subcomplex subunit 1 (NDUFA1) protein (UniProt Ref. No. 015239, entry version #152 of 30 Aug. 2017).

[0098] Accordingly, artificial nucleic acids according to the invention may comprise a 3′UTR element derived from a NDUFA1 gene, wherein said 3′UTR element comprises or consists of a DNA sequence according to SEQ ID NO: 31 or a homolog, variant, fragment or derivative thereof, in particular a DNA sequence having, in increasing order of preference, at least 5%, 10%, 20%, 30%, 40%, 50%, 60%, 70%, 80%, 85%, 86%, 87%, 88%, 89%, 90%, 91%, 92%, 93%, 94%, 95%, 96%, 97%, 98%, or 99%, preferably of at least 70%, more preferably of at least 80%, even more preferably at least 85%, even more preferably of at least 90% and most preferably of at least 95% or even 97%, sequence identity to the nucleic acid sequence according to SEQ ID NO: 31, or wherein said 3′UTR element comprises or consists of an RNA sequence according to SEQ ID NO: 32, or a homolog, variant, fragment or derivative thereof, in particular an RNA sequence having, in increasing order of preference, at least at least 5%, 10%, 20%, 30%, 40%, 50%, 60%, 70%, 80%, 85%, 86%, 87%, 88%, 89%, 90%, 91%, 92%, 93%, 94%, 95%, 96%, 97%, 98%, or 99%, preferably of at least 70%, more preferably of at least 80%, even more preferably at least 85%, even more preferably of at least 90% and most preferably of at least 95% or even 97%, sequence identity to the nucleic acid sequence according to SEQ ID NO: 32.

### RPS9-Derived 3′-UTRs

[0099] Artificial nucleic acids according to the invention may comprise a 3′UTR element which comprises or consists of a nucleic acid sequence, which is derived from a 3′UTR of a gene encoding a 40S ribosomal protein S9 (RPS9) protein, or a homolog, variant, fragment or derivative thereof.

[0100] Such 3′UTR elements preferably comprises or consists of a nucleic acid sequence which is derived from the 3′UTR of a 40S ribosomal protein S9 (RPS9) gene, preferably from a vertebrate, more preferably a mammalian, most preferably a human 40S ribosomal protein S9 (RPS9) gene, or a homolog, variant, fragment or derivative thereof. Said gene may preferably encode a 40S ribosomal protein S9 (RPS9) protein corresponding to a 40S ribosomal protein S9 (RPS9) protein (UniProt Ref. No. P46781, entry version #179 of 30 Aug. 2017).

[0101] Accordingly, artificial nucleic acids according to the invention may comprise a 3′UTR element derived from a RPS9 gene, wherein said 3′UTR element comprises or consists of a DNA sequence according to SEQ ID NO: 33 or a homolog, variant, fragment or derivative thereof, in particular a DNA sequence having, in increasing order of preference, at least 5%, 10%, 20%, 30%, 40%, 50%, 60%, 70%, 80%, 85%, 86%, 87%, 88%, 89%, 90%, 91%, 92%, 93%, 94%, 95%, 96%, 97%, 98%, or 99%, preferably of at least 70%, more preferably of at least 80%, even more preferably at least 85%, even more preferably of at least 90% and most preferably of at least 95% or even 97%, sequence identity to the nucleic acid sequence according to SEQ ID NO: 33, or wherein said 5′UTR element comprises or consists of an RNA sequence according to SEQ ID NO: 34, or a homolog, variant, fragment or derivative thereof, in particular an RNA sequence having, in increasing order of preference, at least at least 5%, 10%, 20%, 30%, 40%, 50%, 60%, 70%, 80%, 85%, 86%, 87%, 88%, 89%, 90%, 91%, 92%, 93%, 94%, 95%, 96%, 97%, 98%, or 99%, preferably of at least 70%, more preferably of at least 80%, even more preferably at least 85%, even more preferably of at least 90% and most preferably of at least 95% or even 97%, sequence identity to the nucleic acid sequence according to SEQ ID NO: 34.

### UTR Combinations

[0102] Preferably, the at least one 5′UTR element and the at least one 3′UTR element act synergistically to modulate, more preferably induce or enhance, the expression of the at least one coding sequence operably linked to said UTR elements. It is envisaged herein to utilize each 5′- and 3′-UTR element exemplified herein in any conceivable combination.

[0103] Preferred combinations of 5′- and 3′-UTR elements are listed in table 1 below.

TABLE 1
UTR combinations

| | 5′ UTR element | SEQ | 3′ UTR element | SEQ |
|---|---|---|---|---|
| # | derived from | ID NO: | derived from | ID NO: |
| 1 | ASAH1 | 4 | CASP1 | 26 |
| 2 | ASAH1 | 4 | COX6B1 | 28 |
| 3 | ASAH1 | 4 | GNAS | 30 |
| 4 | ASAH1 | 4 | NDUFA1 | 32 |
| 5 | ASAH1 | 4 | PSMB3 | 24 |
| 6 | ASAH1 | 4 | RPS9 | 34 |
| 7 | ATP5A1 | 6 | CASP1 | 26 |
| 8 | ATP5A1 | 6 | COX6B1 | 28 |
| 9 | ATP5A1 | 6 | GNAS | 30 |
| 10 | ATP5A1 | 6 | NDUFA1 | 32 |
| 11 | ATP5A1 | 6 | PSMB3 | 24 |
| 12 | ATP5A1 | 6 | RPS9 | 34 |
| 13 | HSD17B4 | 2 | CASP1 | 26 |
| 14 | HSD17B4 | 2 | COX6B1 | 28 |
| 15 | HSD17B4 | 2 | GNAS | 30 |
| 16 | HSD17B4 | 2 | NDUFA1 | 32 |
| 17 | HSD17B4 | 2 | PSMB3 | 24 |
| 18 | HSD17B4 | 2 | RPS9 | 34 |
| 19 | MP68 | 8 | CASP1 | 26 |
| 20 | MP68 | 8 | COX6B1 | 28 |
| 21 | MP68 | 8 | GNAS | 30 |
| 22 | MP68 | 8 | NDUFA1 | 32 |
| 23 | MP68 | 8 | PSMB3 | 24 |
| 24 | MP68 | 8 | RPS9 | 34 |
| 25 | NDUFA4 | 10 | CASP1 | 26 |
| 26 | NDUFA4 | 10 | COX6B1 | 28 |
| 27 | NDUFA4 | 10 | GNAS | 30 |
| 28 | NDUFA4 | 10 | NDUFA1 | 32 |
| 29 | NDUFA4 | 10 | PSMB3 | 24 |
| 30 | NDUFA4 | 10 | RPS9 | 34 |
| 31 | NOSIP | 12 | CASP1 | 26 |
| 32 | NOSIP | 12 | COX6B1 | 28 |
| 33 | NOSIP | 12 | GNAS | 30 |
| 34 | NOSIP | 12 | NDUFA1 | 32 |
| 35 | NOSIP | 12 | PSMB3 | 24 |
| 36 | NOSIP | 12 | RPS9 | 34 |
| 37 | RPL31 | 14 | CASP1 | 26 |
| 38 | RPL31 | 14 | COX6B1 | 28 |
| 39 | RPL31 | 14 | GNAS | 30 |
| 40 | RPL31 | 14 | NDUFA1 | 32 |
| 41 | RPL31 | 14 | PSMB3 | 24 |
| 42 | RPL31 | 14 | RPS9 | 34 |
| 43 | SLC7A3 | 16 | CASP1 | 26 |
| 44 | SLC7A3 | 16 | COX6B1 | 28 |
| 45 | SLC7A3 | 16 | GNAS | 30 |
| 46 | SLC7A3 | 16 | NDUFA1 | 32 |
| 47 | SLC7A3 | 16 | PSMB3 | 24 |
| 48 | SLC7A3 | 16 | RPS9 | 34 |
| 49 | TUBB4B | 18 | CASP1 | 26 |
| 50 | TUBB4B | 18 | COX6B1 | 28 |
| 51 | TUBB4B | 18 | GNAS | 30 |
| 52 | TUBB4B | 18 | NDUFA1 | 32 |
| 53 | TUBB4B | 18 | PSMB3 | 24 |
| 54 | TUBB4B | 18 | RPS9 | 34 |
| 55 | UBQLN2 | 20 | CASP1 | 26 |
| 56 | UBQLN2 | 20 | COX6B1 | 28 |
| 57 | UBQLN2 | 20 | GNAS | 30 |
| 58 | UBQLN2 | 20 | NDUFA1 | 32 |
| 59 | UBQLN2 | 20 | PSMB3 | 24 |
| 60 | UBQLN2 | 20 | RPS9 | 34 |

[0104] Especially the following UTR-combinations are preferred: 5′UTR: ASAH1+3′UTR: CASP1; 5′UTR: ASAH1+3′UTR: COX6B1; 5′UTR: ASAH1+3′UTR: Gnas; 5′UTR: ASAH1+3′UTR: Ndufa1.1; 5′UTR: ASAH1+3′UTR: PSMB3; 5′UTR: ASAH1+3′UTR: RPS9; 5′UTR: ATP5A1+3′UTR: CASP1; 5′UTR: ATP5A1+3′UTR: COX6B1; 5′UTR: ATP5A1+3′UTR: Gnas; 5′UTR: ATP5A1+3′UTR: Ndufa1.1; 5′UTR: ATP5A1+3′UTR: PSMB3; 5′UTR: ATP5A1+3′UTR: RPS9; 5′UTR: HSD17B4+3′UTR: CASP1; 5′UTR: HSD17B4+3′UTR: COX6B1; 5′UTR: HSD17B4+3′UTR: Ndufa1.1; 5′UTR: HSD17B4+3′UTR: PSMB3; 5′UTR: HSD17B4+3′UTR: RPS9; 5′UTR: Mp68+3′UTR: CASP1; 5′UTR: Mp68+3′UTR: COX6B1; 5′UTR: Mp68+3′UTR: Gnas; 5′UTR: Mp68+3′UTR: Ndufa1.1; 5′UTR: Mp68+3′UTR: PSMB3; 5′UTR: Mp68+3′UTR: RPS9; 5′UTR: Ndufa4+3′UTR: CASP1; 5′UTR: Ndufa4+3′UTR: COX6B1; 5′UTR: Ndufa4+3′UTR: Gnas; 5′UTR: Ndufa4+3′UTR: Ndufa1.1; 5′UTR: Ndufa4+3′UTR: PSMB3; 5′UTR: Ndufa4+3′UTR: RPS9; 5′UTR: Nosip+3′UTR: CASP1; 5′UTR: Nosip+3′UTR: COX6B1; 5′UTR: Nosip+3′UTR: Gnas; 5′UTR: Nosip+3′UTR: Ndufa1.1; 5′UTR: Nosip+3′UTR: PSMB3; 5′UTR: Nosip+3′UTR: RPS9; 5′UTR: Rpl31+3′UTR: CASP1; 5′UTR: Rpl31+3′UTR: COX6B1; 5′UTR: Rpl31+3′UTR: Gnas; 5′UTR: Rpl31+3′UTR: Ndufa1.1; 5′UTR: Rpl31+3′UTR: PSMB3; 5′UTR: Rpl31+3′UTR: RPS9; 5′UTR: Slc7a3+3′UTR: CASP1; 5′UTR: Slc7a3+3′UTR: COX6B1; 5′UTR: Slc7a3+3′UTR: Ndufa1.1; 5′UTR: Slc7a3+3′UTR: PSMB3; 5′UTR: Slc7a3+3′UTR: RPS9; 5′UTR: TUBB4B+3′UTR: CASP1; 5′UTR: TUBB4B+3′UTR: COX6B1; 5′UTR: TUBB4B+3′UTR: Gnas; 5′UTR: TUBB4B+3′UTR: Ndufa1.1; 5′UTR: TUBB4B+3′UTR: PSMB3; 5′UTR: TUBB4B+3′UTR: RPS9; 5′UTR: Ubqln2+3′UTR: CASP1; 5′UTR: Ubqln2+3′UTR: COX6B1; 5′UTR: Ubqln2+3′UTR: Gnas; 5′UTR: Ubqln2+3′UTR: Ndufa1.1; 5′UTR: Ubqln2+3′UTR: PSMB3; and 5′UTR: Ubqln2+3′UTR: RPS9, preferably the UTR-combination 5′UTR: HSD17B4+3′UTR: Gnas, more preferably the UTR-combination 5′UTR: Slc7a3+3′UTR: Gnas.

[0105] Each of the UTR elements defined in table 1 by reference to a specific SEQ ID NO may include variants or fragments of the nucleic acid sequence defined by said specific SEQ ID NO, exhibiting at least 5%, 10%, 20%, 30%, 40%, 50%, 60%, 70%, 80%, 85%, 86%, 87%, 88%, 89%, 90%, 91%, 92%, 93%, 94%, 95%, 96%, 97%, 98%, or 99%, preferably of at least 70%, more preferably of at least 80%, even more preferably at least 85%, even more preferably of at least 90% and most preferably of at least 95% or even 97%, sequence identity to the respective nucleic acid sequence defined by reference to its specific SEQ ID NO. Each of the sequences identified in table 1 by reference to their specific SEQ ID NO may also be defined by its corresponding DNA sequence, as indicated herein. Each of the sequences identified in table 1 by reference to their specific SEQ ID NO may be modified (optionally independently from each other) as described herein below.

[0106] Preferred artificial nucleic acids according to the invention may comprise:
[0107] a-1. at least one 5′ UTR element derived from a 5′UTR of a HSD17B4 gene, or from a corresponding RNA sequence, homolog, fragment or variant thereof and at least one 3′ UTR element derived from a 3′UTR of a PSMB3 gene, or from a corresponding RNA sequence, homolog, fragment or variant thereof; or
[0108] a-2. at least one 5′ UTR element derived from a 5′UTR of a NDUFA4 gene, or from a corresponding RNA sequence, homolog, fragment or variant thereof and at least one 3′ UTR element derived from a 3′UTR of a PSMB3 gene, or from a corresponding RNA sequence, homolog, fragment or variant thereof; or
[0109] a-3. at least one 5′ UTR element derived from a 5′UTR of a SLC7A3 gene, or from a corresponding RNA sequence, homolog, fragment or variant thereof and at least one 3′ UTR element derived from a 3′UTR of a PSMB3 gene, or from a corresponding RNA sequence, homolog, fragment or variant thereof; or
[0110] a-4. at least one 5′ UTR element derived from a 5′UTR of a NOSIP gene, or from a corresponding RNA sequence, homolog, fragment or variant thereof and at least one 3′ UTR element derived from a 3′UTR of a PSMB3 gene, or from a corresponding RNA sequence, homolog, fragment or variant thereof; or
[0111] a-5. at least one 5′ UTR element derived from a 5′UTR of a MP68 gene, or from a corresponding RNA sequence, homolog, fragment or variant thereof and at least one 3′ UTR element derived from a 3′UTR of a PSMB3 gene, or from a corresponding RNA sequence, homolog, fragment or variant thereof; or
[0112] b-1. at least one 5′ UTR element derived from a 5′UTR of a UBQLN2 gene, or from a corresponding RNA sequence, homolog, fragment or variant thereof and at least one 3′ UTR element derived from a 3′UTR of a RPS9 gene, or from a corresponding RNA sequence, homolog, fragment or variant thereof; or
[0113] b-2. at least one 5′ UTR element derived from a 5′UTR of a ASAH1 gene, or from a corresponding RNA sequence, homolog, fragment or variant thereof and at least one 3′ UTR element derived from a 3′UTR of a RPS9 gene, or from a corresponding RNA sequence, homolog, fragment or variant thereof; or
[0114] b-3. at least one 5′ UTR element derived from a 5′UTR of a HSD17B4 gene, or from a corresponding RNA sequence, homolog, fragment or variant thereof and at least one 3′ UTR element derived from a 3′UTR of a RPS9 gene, or from a corresponding RNA sequence, homolog, fragment or variant thereof; or
[0115] b-4. at least one 5′ UTR element derived from a 5′UTR of a HSD17B4 gene, or from a corresponding RNA sequence, homolog, fragment or variant thereof and at least one 3′ UTR element derived from a 3′UTR of a CASP1 gene, or from a corresponding RNA sequence, homolog, fragment or variant thereof; or
[0116] b-5. at least one 5′ UTR element derived from a 5′UTR of a NOSIP gene, or from a corresponding RNA sequence, homolog, fragment or variant thereof and at least one 3′ UTR element derived from a 3′UTR of a COX6B1 gene, or from a corresponding RNA sequence, homolog, fragment or variant thereof; or
[0117] c-1. at least one 5′ UTR element derived from a 5′UTR of a NDUFA4 gene, or from a corresponding RNA sequence, homolog, fragment or variant thereof and at least one 3′ UTR element derived from a 3′UTR of a RPS9 gene, or from a corresponding RNA sequence, homolog, fragment or variant thereof; or
[0118] c-2. at least one 5′ UTR element derived from a 5′UTR of a NOSIP gene, or from a corresponding RNA sequence, homolog, fragment or variant thereof and at least one 3′ UTR element derived from a 3′UTR of a NDUFA1 gene, or from a corresponding RNA sequence, homolog, fragment or variant thereof; or
[0119] c-3. at least one 5′ UTR element derived from a 5′UTR of a NDUFA4 gene, or from a corresponding RNA sequence, homolog, fragment or variant thereof and at least one 3′ UTR element derived from a 3′UTR of a COX6B1 gene, or from a corresponding RNA sequence, homolog, fragment or variant thereof; or
[0120] c-4. at least one 5′ UTR element derived from a 5′UTR of a NDUFA4 gene, or from a corresponding RNA sequence, homolog, fragment or variant thereof and at least one 3′ UTR element derived from a 3′UTR of a NDUFA1 gene, or from a corresponding RNA sequence, homolog, fragment or variant thereof; or
[0121] c-5. at least one 5′ UTR element derived from a 5′UTR of a ATP5A1 gene, or from a corresponding RNA sequence, homolog, fragment or variant thereof and at least one 3′ UTR element derived from a 3′UTR of a PSMB3 gene, or from a corresponding RNA sequence, homolog, fragment or variant thereof; or
[0122] d-1. at least one 5′ UTR element derived from a 5′UTR of a RPL31 gene, or from a corresponding RNA sequence, homolog, fragment or variant thereof and at least one 3′ UTR element derived from a 3′UTR of a PSMB3 gene, or from a corresponding RNA sequence, homolog, fragment or variant thereof; or
[0123] d-2. at least one 5′ UTR element derived from a 5′UTR of a ATP5A1 gene, or from a corresponding RNA sequence, homolog, fragment or variant thereof and at least one 3′ UTR element derived from a 3′UTR of a CASP1 gene, or from a corresponding RNA sequence, homolog, fragment or variant thereof; or
[0124] d-3. at least one 5′ UTR element derived from a 5′UTR of a SLC7A3 gene, or from a corresponding RNA sequence, homolog, fragment or variant thereof and at least one 3′ UTR element derived from a 3′UTR of a GNAS1 gene, or from a corresponding RNA sequence, homolog, fragment or variant thereof; or
[0125] d-4. at least one 5′ UTR element derived from a 5′UTR of a HSD17B4 gene, or from a corresponding RNA sequence, homolog, fragment or variant thereof and at least one 3′ UTR element derived from a 3′UTR of a NDUFA1 gene, or from a corresponding RNA sequence, homolog, fragment or variant thereof; or
[0126] d-5. at least one 5′ UTR element derived from a 5′UTR of a SLC7A3 gene, or from a corresponding RNA sequence, homolog, fragment or variant thereof and at least one 3′ UTR element derived from a 3′UTR of a NDUFA1 gene, or from a corresponding RNA sequence, homolog, fragment or variant thereof; or
[0127] e-1. at least one 5′ UTR element derived from a 5′UTR of a TUBB4B gene, or from a corresponding RNA sequence, homolog, fragment or variant thereof and at least one 3′ UTR element derived from a 3′UTR of a RPS9 gene, or from a corresponding RNA sequence, homolog, fragment or variant thereof; or
[0128] e-2. at least one 5′ UTR element derived from a 5′UTR of a RPL31 gene, or from a corresponding RNA sequence, homolog, fragment or variant thereof and at least one 3′ UTR element derived from a 3′UTR of a RPS9 gene, or from a corresponding RNA sequence, homolog, fragment or variant thereof; or
[0129] e-3. at least one 5′ UTR element derived from a 5′UTR of a MP68 gene, or from a corresponding RNA sequence, homolog, fragment or variant thereof and at least one 3′ UTR element derived from a 3′UTR of a RPS9 gene, or from a corresponding RNA sequence, homolog, fragment or variant thereof; or
[0130] e-4. at least one 5′ UTR element derived from a 5′UTR of a NOSIP gene, or from a corresponding RNA sequence, homolog, fragment or variant thereof and at least one 3′ UTR element derived from a 3′UTR of a RPS9 gene, or from a corresponding RNA sequence, homolog, fragment or variant thereof; or
[0131] e-5. at least one 5′ UTR element derived from a 5′UTR of a ATP5A1 gene, or from a corresponding RNA sequence, homolog, fragment or variant thereof and at least one 3′ UTR element derived from a 3′UTR of a RPS9 gene, or from a corresponding RNA sequence, homolog, fragment or variant thereof; or
[0132] e-6. at least one 5′ UTR element derived from a 5′UTR of a ATP5A1 gene, or from a corresponding RNA sequence, homolog, fragment or variant thereof and at least one 3′ UTR element derived from a 3′UTR of a COX6B1 gene, or from a corresponding RNA sequence, homolog, fragment or variant thereof; or
[0133] f-1. at least one 5′ UTR element derived from a 5′UTR of a ATP5A1 gene, or from a corresponding RNA sequence, homolog, fragment or variant thereof and at least one 3′ UTR element derived from a 3′UTR of a GNAS gene, or from a corresponding RNA sequence, homolog, fragment or variant thereof; or
[0134] f-2. at least one 5′ UTR element derived from a 5′UTR of a ATP5A1 gene, or from a corresponding RNA sequence, homolog, fragment or variant thereof and at least one 3′ UTR element derived from a 3′UTR of a NDUFA1 gene, or from a corresponding RNA sequence, homolog, fragment or variant thereof; or
[0135] f.3 at least one 5′ UTR element derived from a 5′UTR of a HSD17B4 gene, or from a corresponding RNA sequence, homolog, fragment or variant thereof and at least one 3′ UTR element derived from a 3′UTR of a COX6B1 gene, or from a corresponding RNA sequence, homolog, fragment or variant thereof; or
[0136] f-4 at least one 5′ UTR element derived from a 5′UTR of a HSD17B4 gene, or from a corresponding RNA sequence, homolog, fragment or variant thereof and at least one 3′ UTR element derived from a 3′UTR of a GNAS1 gene, or from a corresponding RNA sequence, homolog, fragment or variant thereof; or
[0137] f-5. at least one 5′ UTR element derived from a 5′UTR of a MP68 gene, or from a corresponding RNA sequence, homolog, fragment or variant thereof and at least one 3′ UTR element derived from a 3′UTR of a COX6B1 gene, or from a corresponding RNA sequence, homolog, fragment or variant thereof; or
[0138] g-1. at least one 5′ UTR element derived from a 5′UTR of a MP68 gene, or from a corresponding RNA sequence, homolog, fragment or variant thereof and at least one 3′ UTR element derived from a 3′UTR of a NDUFA1 gene, or from a corresponding RNA sequence, homolog, fragment or variant thereof; or
[0139] g-2. at least one 5′ UTR element derived from a 5′UTR of a NDUFA4 gene, or from a corresponding RNA sequence, homolog, fragment or variant thereof and at least one 3′ UTR element derived from a 3′UTR of a CASP1 gene, or from a corresponding RNA sequence, homolog, fragment or variant thereof; or
[0140] g-3. at least one 5′ UTR element derived from a 5′UTR of a NDUFA4 gene, or from a corresponding RNA sequence, homolog, fragment or variant thereof and at least one 3′ UTR element derived from a 3′UTR of a GNAS gene, or from a corresponding RNA sequence, homolog, fragment or variant thereof; or
[0141] g-4 at least one 5′ UTR element derived from a 5′UTR of a NOSIP gene, or from a corresponding RNA sequence, homolog, fragment or variant thereof and at least one 3′ UTR element derived from a 3′UTR of a CASP1 gene, or from a corresponding RNA sequence, homolog, fragment or variant thereof; or
[0142] g-5 at least one 5′ UTR element derived from a 5′UTR of a RPL31 gene, or from a corresponding RNA sequence, homolog, fragment or variant thereof and at least one 3′ UTR element derived from a 3′UTR of a CASP1 gene, or from a corresponding RNA sequence, homolog, fragment or variant thereof; or
[0143] h-1 at least one 5′ UTR element derived from a 5′UTR of a RPL31 gene, or from a corresponding RNA sequence, homolog, fragment or variant thereof and at least one 3′ UTR element derived from a 3′UTR of a COX6B1 gene, or from a corresponding RNA sequence, homolog, fragment or variant thereof; or
[0144] h-2 at least one 5′ UTR element derived from a 5′UTR of a RPL31 gene, or from a corresponding RNA sequence, homolog, fragment or variant thereof and at least one 3′ UTR element derived from a 3′UTR of a GNAS gene, or from a corresponding RNA sequence, homolog, fragment or variant thereof; or
[0145] h-3 at least one 5′ UTR element derived from a 5′UTR of a RPL31 gene, or from a corresponding RNA sequence, homolog, fragment or variant thereof and at least one 3′ UTR element derived from a 3′UTR of a NDUFA1 gene, or from a corresponding RNA sequence, homolog, fragment or variant thereof; or
[0146] h-4 at least one 5′ UTR element derived from a 5′UTR of a SLC7A3 gene, or from a corresponding RNA sequence, homolog, fragment or variant thereof and at least one 3′ UTR element derived from a 3′UTR of a CASP1 gene, or from a corresponding RNA sequence, homolog, fragment or variant thereof; or
[0147] h-5 at least one 5′ UTR element derived from a 5′UTR of a SLC7A3 gene, or from a corresponding RNA sequence, homolog, fragment or variant thereof and at least one 3′ UTR element derived from a 3′UTR of a COX6B1 gene, or from a corresponding RNA sequence, homolog, fragment or variant thereof; or
[0148] i-1 at least one 5′ UTR element derived from a 5′UTR of a SLC7A3 gene, or from a corresponding RNA sequence, homolog, fragment or variant thereof and at least one 3′ UTR element derived from a 3′UTR of a RPS9 gene, or from a corresponding RNA sequence, homolog, fragment or variant thereof; or
[0149] i-2 at least one 5′ UTR element derived from a 5′UTR of a Ndufa4.1 gene, or from a corresponding RNA sequence, homolog, fragment or variant thereof and at least one 3′ UTR element derived from a 3′UTR of a CASP1 gene, or from a corresponding RNA sequence, homolog, fragment or variant thereof.

[0150] Particularly preferred artificial nucleic acids may comprise a combination of UTRs according to a-1, a-2, a-3, a-4 or a-5, preferably according to a-1.

[0151] Surprisingly it was discovered that certain combinations of 5′ and 3′-untranslated regions (UTRs) as disclosed herein act in concert to synergistically enhance the expression of operably linked nucleic acid sequences. Testing for synergy of UTR combinations is routine for a skilled person in the art, f.e. a test for synergy can be performed by Luciferase expression after mRNA transfection to prove that effects of synergy are present, i.e. more than an additive effect.

### Expression in the Liver

[0152] Any of the UTR combinations disclosed herein is envisaged to modulate, preferably induce and more preferably enhance, the expression of an operably linked coding sequence (cds). Without wishing to be bound by specific theory, some of the UTR combinations disclosed herein may be particularly useful when used in connection with specific coding sequences and/or when used in connection with a specific target cells or tissues.

[0153] In some embodiments, the artificial nucleic acid molecule according to the invention may comprise UTR elements according to a-2 (NDUFA4/PSMB3); a-5 (MP68/PSMB3); c-1 (NDUFA4/RPS9); a-1 (HSD17B4/PSMB3); e-3 (MP68/RPS9); e-4 (NOSIP/RPS9); a-4 (NOSIP/PSMB3); e-2 (RPL31/RPS9); e-5 (ATP5A1/RPS9); d-4 (HSD17B4/NUDFA1); b-5 (NOSIP/COX6B1); a-3 (SLC7A3/PSMB3); b-1 (UBQLN2/RPS9); b-2 (ASAH1/RPS9); b-4 (HSD17B4/CASP1); e-6 (ATP5A1/COX6B1); b-3 (HSD17B4/RPS9); g-5 (RPL31/CASP1); h-1 (RPL31/COX6B1); and/or c-5 (ATP5A1/PSMB3) as defined above. Such artificial nucleic acid molecules may be particularly useful for expression of an encoded (poly-)peptide or protein of interest in the liver. Accordingly, such artificial nucleic acid molecules are particularly envisaged for systemical administration, in particular intravenous, intraperitoneal, intramuscular or intratracheal administration or injection and optionally in combination with liver-targeting elements herein (as discussed below). Furthermore, without wishing to imply any particular limitation, the aforementioned UTR combinations may be particularly useful for artificial nucleic acids encoding, in their at least one coding region, a therapeutic (poly-)peptide or protein, an antigenic or allergic (poly-)peptide or protein as disclosed herein, for instance a protein useful in treating a disease selected from the group consisting of genetic diseases, allergies, autoimmune diseases, infectious diseases, neoplasms, cancer, and tumor-related diseases, inflammatory diseases, diseases of the blood and blood-forming organs, endocrine, nutritional and metabolic diseases, diseases of the nervous system, diseases of the circulatory system, diseases of the respiratory system, diseases of the digestive system, diseases of the skin and subcutaneous tissue, diseases of the musculoskeletal system and connective tissue, and diseases of the genitourinary system, independently if they are inherited or acquired, and combinations thereof.

### Dermis, Epidermis and Subcutaneous Expression

[0154] In some embodiments, the artificial nucleic acid molecule according to the invention may comprise UTR elements according to a-1 (HSD17B4/PSMB3); a-3 (SLC7A3/PSMB3); e-2 (RPL31/RPS9); a-5 (MP68/PSMB3); d-1 (RPL31/PSMB3); a-2 (NDUFA4/PSMB3); h-1 (RPL31/COX6B1); b-1 (UBQLN2/RPS9); a-4 (NOSIP/PSMB3); c-5 (ATP5A1/PSMB3); b-5 (NOSIP/COX6B1); d-4 (HSD17B4/NDUFA1); i-1 (SLC7A3/RPS9); f-3 (HSD17B4/COX6B1); b-4 (HSD17B4/CASP1); g-5 (RPL31/CASP1); c-2 (NOSIP/NDUFA1); e-4 (NOSIP/RPS9); c-4 (NDUFA4/NDUFA1); and/or d-5 (SLC7A3/NDUFA1) as defined above. Such artificial nucleic acid molecules may be particularly useful for expression of an encoded (poly-)peptide or protein of interest in the skin. Accordingly, such artificial nucleic acid molecules are particularly envisaged for intra-dermal administration, in particular topical, transdermal, intra-dermal injection, subcutaneous, or epicutaneous administration or injection herein. Furthermore, without wishing to imply any particular limitation, the aforementioned UTR combinations may be particularly useful for artificial nucleic acids encoding, in their at least one coding region, a therapeutic (poly-)peptide or protein, an antigenic or allergic (poly-)peptide or protein as disclosed herein, for instance a protein useful in treating a disease selected from the group consisting of genetic diseases, allergies, autoimmune diseases, infectious diseases, neoplasms, cancer, and tumor-related diseases, inflammatory diseases, diseases of the blood and blood-forming organs, endocrine, nutritional and metabolic diseases, diseases of the nervous system, diseases of the circulatory system, diseases of the respiratory system, diseases of the digestive system, diseases of the skin and subcutaneous tissue, diseases of the musculoskeletal system and connective tissue, and diseases of the genitourinary system, independently if they are inherited or acquired, and combinations thereof.

### Expression in the Muscle

[0155] In some embodiments, the artificial nucleic acid molecule according to the invention may comprise UTR elements according to a-4 (NOSIP/PSMB3); a-1 (HSD17B4/PSMB3); a-5 (MP68/PSMB3); d-3 (SLC7A3/GNAS); a-2 (NDUFA4/PSMB3); a-3 (SLC7A3/PSMB3); d-5 (SLC7A3/NDUFA1); i-1 (SLC7A3/RPS9); d-1 (RPL31/PSMB3); d-4 (HSD17B4/NDUFA1); b-3 (HSD17B4/RPS9); f-3 (HSD17B4/COX6B1); f-4 (HSD17B4/GNAS); h-5 (SLC7A3/COX6B1); g-4 (NOSIP/CASP1); c-3 (NDUFA4/COX6B1); b-1 (UBQLN2/RPS9); c-5 (ATP5A1/PSMB3); h-4 (SLC7A3/CASP1); h-2 (RPL31/GNAS); e-1 (TUBB4B/RPS9); f-2 (ATP5A1/NDUFA1); c-2 (NOSIP/NDUFA1); b-5 (NOSIP/COX6B1); and/or e-4 (NOSIP/RPS9) as defined above. Such artificial nucleic acid molecules may be particularly useful for expression of an encoded (poly-)peptide or protein of interest in the skeletal muscle, smooth muscle or cardiac muscle. Accordingly, such artificial nucleic acid molecules are particularly envisaged for intra-muscular administration, more preferably intra-muscular injection or intracardiac injection, herein. Furthermore, without wishing to imply any particular limitation, the aforementioned UTR combinations may be particularly useful for artificial nucleic acids encoding, in their at least one coding region, a therapeutic (poly-)peptide or protein, an antigenic or allergic (poly-)peptide or protein as disclosed herein, for instance a protein useful in treating a disease selected from the group consisting of genetic diseases, allergies, autoimmune diseases, infectious diseases, neoplasms, cancer, and tumor-related diseases, inflammatory diseases, diseases of the blood and blood-forming organs, endocrine, nutritional and metabolic diseases, diseases of the nervous system, diseases of the circulatory system, diseases of the respiratory system, diseases of the digestive system, diseases of the skin and subcutaneous tissue, diseases of the musculoskeletal system and connective tissue, and diseases of the genitourinary system, independently if they are inherited or acquired, and combinations thereof.

### Expression in Tumor and Cancer Cells

[0156] In some embodiments, the artificial nucleic acid molecule according to the invention may comprise UTR elements according to e-1 (TUBB4B/RPS9); b-2 (ASAH1/RPS9); c-3 (NDUFA4/COX6B1); a-1 (HSD17B4/PSMB3); c-4 (NDUFA4/NDUFA1); b-4 (HSD17B4/CASP1); d-2 (ATP5A1/CASP1); b-5 (NOSIP/COX6B1); a-2 (NDUFA4/PSMB3); b-1 (UBQLN/RPS9); a-3 (SLC7A3/PSMB3); f-4 (HSD17B4/GNAS); c-2 (NOSIP/NDUFA1); b-3 (HSD17B4/RPS9); c-5 (ATP5A1/PSMB3); a-4 (NOSIP/PSMB3); d-5 (SLC7A3/NDUFA1); or f-3 (HSD17B4/COX6B1) as defined above. Such artificial nucleic acid molecules may be particularly useful for expression of an encoded (poly-)peptide or protein of interest in a tumor or cancer cell, including a carcinoma, sarcoma, lymphoma, leukemia, germ cell tumor or blastoma cell. Accordingly, such artificial nucleic acid molecules are particularly envisaged for intra-tumoral, intramuscular, subcutaneous, intravenous, intradermal, intraperitoneal, intrapleural, intraosseous administration or injection herein. Furthermore, without wishing to imply any particular limitation, the aforementioned UTR combinations may be particularly useful for artificial nucleic acids encoding, in their at least one coding region, a therapeutic (poly-)peptide or protein, an antigenic or allergic (poly-)peptide or protein as disclosed herein, for instance a protein useful in treating a disease selected from the group consisting of a cancer or tumor disease.

### Expression in Kidney Cells

[0157] In some embodiments, the artificial nucleic acid molecule according to the invention may comprise UTR elements according to b-2 (ASAH1/RPS9); c-1 (NDUFA4/RPS9.1); e-3 (MP68/RPS9); c-4 (NDUFA4/NDUFA1); c-2 (NOSIP/NDUFA1); h-2 (RPL31/CASP1); d-2 (ATP5A1/CASP1); b-3 (HSD17B4/RPS9); a-2 (NDUFA4/PSMB3); f-4 (HSD17B4/GNAS); d-3 (SLC7A3/GNAS); g-1 (MP68/NDUFA1); c-3 (NDUFA4/COX6B1); e-5 (ATP5A1/RPS9); h-3 (RPL31/NDUFA1); a-1 (HSD17B4/PSMB3); a-5 (MP68/PSMB3); g-4 (NOSIP/CASP1); b-1 (UQBLN/RPS9); d-4 (HSD17B4/NDUFA1); or e-2 (RPL31/RPS9) as defined above. Such artificial nucleic acid molecules may be particularly useful for expression of an encoded (poly-)peptide or protein of interest in kidney cells. Accordingly, such artificial nucleic acid molecules are particularly envisaged for systemical administration, in particular intravenous, intraperitoneal, intramuscular or intratracheal administration or injection and optionally in combination with kidney-targeting elements herein. Furthermore, without wishing to imply any particular limitation, the aforementioned UTR combinations may be particularly useful for artificial nucleic acids encoding, in their at least one coding region, a therapeutic (poly-)peptide or protein, an antigenic or allergic (poly-)peptide or protein as disclosed herein, for instance a protein useful in treating a disease selected from the group consisting of genetic diseases, allergies, autoimmune diseases, infectious diseases, neoplasms, cancer, and tumor-related diseases, inflammatory diseases, diseases of the blood and blood-forming organs, endocrine, nutritional and metabolic diseases, diseases of the nervous system, diseases of the circulatory system, diseases of the respiratory system, diseases of the digestive system, diseases of the skin and subcutaneous tissue, diseases of the musculoskeletal system and connective tissue, and diseases of the genitourinary system, independently if they are inherited or acquired, and combinations thereof.

[0158] In view of the above, artificial nucleic acid molecules according to the invention may be defined as indicated above, wherein
[0159] said 5′UTR element derived from a HSD17B4 gene comprises or consists of a DNA sequence according to SEQ ID NO: 1 or a DNA sequence having, in increasing order of preference, at least 50%, 60%, 70%, 80%, 90%, 95%, 96%, 97%, 98%, or 99% sequence identity to the nucleic acid sequence according to SEQ ID NO: 1, or a fragment or a variant thereof; or an RNA sequence according to SEQ ID NO: 2, or an RNA sequence having, in increasing order of preference, at least 50%, 60%, 70%, 80%, 90%, 95%, 96%, 97%, 98%, or 99% sequence identity to the nucleic acid sequence according to SEQ ID NO: 2, or a fragment or a variant thereof;
[0160] said 5′UTR element derived from a ASAH1 gene comprises or consists of a DNA sequence according to SEQ ID NO: 3 or a DNA sequence having, in increasing order of preference, at least 50%, 60%, 70%, 80%, 90%, 95%, 96%, 97%, 98%, or 99% sequence identity to the nucleic acid sequence according to SEQ ID NO: 3, or a fragment or variant thereof; or an RNA sequence according to SEQ ID NO: 4, or an RNA sequence having, in increasing order of preference, at least 50%, 60%, 70%, 80%, 90%, 95%, 96%, 97%, 98%, or 99% sequence identity to the nucleic acid sequence according to SEQ ID NO: 4, or a fragment or a variant thereof;
[0161] said 5′UTR element derived from a ATP5A1 gene comprises or consists of a DNA sequence according to SEQ ID NO: 5, or a DNA sequence having, in increasing order of preference, at least 50%, 60%, 70%, 80%, 90%, 95%, 96%, 97%, 98%, or 99% sequence identity to the nucleic acid sequence according to SEQ ID NO: 5, or a fragment or variant thereof; or an RNA sequence according to SEQ ID NO: 6, or an RNA sequence having, in increasing order of preference, at least 50%, 60%, 70%, 80%, 90%, 95%, 96%, 97%, 98%, or 99% sequence identity to the nucleic acid sequence according to SEQ ID NO: 6, or a fragment or a variant thereof;
[0162] said 5′UTR element derived from a MP68 gene comprises or consists of a DNA sequence according to SEQ ID NO: 7, or a DNA sequence having, in increasing order of preference, at least 50%, 60%, 70%, 80%, 90%, 95%, 96%, 97%, 98%, or 99% sequence identity to the nucleic acid sequence according to SEQ ID NO: 7, or a fragment or variant thereof; or an RNA sequence according to SEQ ID NO: 8, or an RNA sequence having, in increasing order of preference, at least 50%, 60%, 70%, 80%, 90%, 95%, 96%, 97%, 98%, or 99% sequence identity to the nucleic acid sequence according to SEQ ID NO: 8, or a fragment or a variant thereof;
[0163] said 5′UTR element derived from a NDUFA4 gene comprises or consists of a DNA sequence according to SEQ ID NO: 9, or a DNA sequence having, in increasing order of preference, at least 50%, 60%, 70%, 80%, 90%, 95%, 96%, 97%, 98%, or 99% sequence identity to the nucleic acid sequence according to SEQ ID NO: 9, or a fragment or variant thereof; or an RNA sequence according to SEQ ID NO: 10, or an RNA sequence having, in increasing order of preference, at least 50%, 60%, 70%, 80%, 90%, 95%, 96%, 97%, 98%, or 99% sequence identity to the nucleic acid sequence according to SEQ ID NO: 10, or a fragment or a variant thereof;
[0164] said 5′UTR element derived from a NOSIP gene comprises or consists of a DNA sequence according to SEQ ID NO: 11, or a DNA sequence having, in increasing order of preference, at least 50%, 60%, 70%, 80%, 90%, 95%, 96%, 97%, 98%, or 99% sequence identity to the nucleic acid sequence according to SEQ ID NO: 11, or a fragment or variant thereof; or an RNA sequence according to SEQ ID NO: 12, or an RNA sequence having, in increasing order of preference, at least 50%, 60%, 70%, 80%, 90%, 95%, 96%, 97%, 98%, or 99% sequence identity to the nucleic acid sequence according to SEQ ID NO: 12, or a fragment or a variant thereof;
[0165] said 5′UTR element derived from a RPL31 gene comprises or consists of a DNA sequence according to SEQ ID NO: 13, or a DNA sequence having, in increasing order of preference, at least 50%, 60%, 70%, 80%, 90%, 95%, 96%, 97%, 98%, or 99% sequence identity to the nucleic acid sequence according to SEQ ID NO: 13, or a fragment or variant thereof; an RNA sequence according to SEQ ID NO: 14, or an RNA sequence having, in increasing order of preference, at least 50%, 60%, 70%, 80%, 90%, 95%, 96%, 97%, 98%, or 99% sequence identity to the nucleic acid sequence according to SEQ ID NO: 14, or a fragment or a variant thereof;
[0166] said 5′UTR element derived from a SLC7A3 gene comprises or consists of a DNA sequence according to SEQ ID NO: 15, or a DNA sequence having, in increasing order of preference, at least 50%, 60%, 70%, 80%, 90%, 95%, 96%, 97%, 98%, or 99% sequence identity to the nucleic acid sequence according to SEQ ID NO: 15, or a fragment or variant thereof; or an RNA sequence according to SEQ ID NO: 16, or an RNA sequence having, in increasing order of preference, at least 50%, 60%, 70%, 80%, 90%, 95%, 96%, 97%, 98%, or 99% sequence identity to the nucleic acid sequence according to SEQ ID NO: 16, or a fragment or a variant thereof;
[0167] said 5′UTR element derived from a TUBB4B gene comprises or consists of a DNA sequence according to SEQ ID NO: 17, or a DNA sequence having, in increasing order of preference, at least 50%, 60%, 70%, 80%, 90%, 95%, 96%, 97%, 98%, or 99% sequence identity to the nucleic acid sequence according to SEQ ID NO: 17, or a fragment or variant thereof; or an RNA sequence according to SEQ ID NO: 18, or an RNA sequence having, in increasing order of preference, at least 50%, 60%, 70%, 80%, 90%, 95%, 96%, 97%, 98%, or 99% sequence identity to the nucleic acid sequence according to SEQ ID NO: 18, or a fragment or a variant thereof;
[0168] said 5′UTR element derived from a UBQLN2 gene comprises or consists of a DNA sequence according to SEQ ID NO: 19, or a DNA sequence having, in increasing order of preference, at least 50%, 60%, 70%, 80%, 90%, 95%, 96%, 97%, 98%, or 99% sequence identity to the nucleic acid sequence according to SEQ ID NO: 19, or a fragment or variant thereof; or an RNA sequence according to SEQ ID NO: 20, or an RNA sequence having, in increasing order of preference, at least 50%, 60%, 70%, 80%, 90%, 95%, 96%, 97%, 98%, or 99% sequence identity to the nucleic acid sequence according to SEQ ID NO: 20, or a fragment or a variant thereof;
[0169] said 3′UTR element derived from a PSMB3 gene comprises or consists of a DNA sequence according to SEQ ID NO: 23, or a DNA sequence having, in increasing order of preference, at least 50%, 60%, 70%, 80%, 90%, 95%, 96%, 97%, 98%, or 99% sequence identity to the nucleic acid sequence according to SEQ ID NO: 23, or a fragment or variant thereof; or an RNA sequence according to SEQ ID NO: 24, or an RNA sequence having, in increasing order of preference, at least 50%, 60%, 70%, 80%, 90%, 95%, 96%, 97%, 98%, or 99% sequence identity to the nucleic acid sequence according to SEQ ID NO: 24, or a fragment or a variant thereof;
[0170] said 3′UTR element derived from a CASP1 gene comprises or consists of a DNA sequence according to SEQ ID NO: 25, or a DNA sequence having, in increasing order of preference, at least 50%, 60%, 70%, 80%, 90%, 95%, 96%, 97%, 98%, or 99% sequence identity to the nucleic acid sequence according to SEQ ID NO: 25, or a fragment or variant thereof; or an RNA sequence according to SEQ ID NO: 26, or an RNA sequence having, in increasing order of preference, at least 50%, 60%, 70%, 80%, 90%, 95%, 96%, 97%, 98%, or 99% sequence identity to the nucleic acid sequence according to SEQ ID NO: 26, or a fragment or a variant thereof;
[0171] said 3′UTR element derived from a COX6B1 gene comprises or consists of a DNA sequence according to SEQ ID NO: 27, or a DNA sequence having, in increasing order of preference, at least 50%, 60%, 70%, 80%, 90%, 95%, 96%, 97%, 98%, or 99% sequence identity to the nucleic acid sequence according to SEQ ID NO: 27, or a fragment or variant thereof; or an RNA sequence according to SEQ ID NO: 28, or an RNA sequence having, in increasing order of preference, at least 50%, 60%, 70%, 80%, 90%, 95%, 96%, 97%, 98%, or 99% sequence identity to the nucleic acid sequence according to SEQ ID NO: 28, or a fragment or a variant thereof;
[0172] said 3′UTR element derived from a GNAS gene comprises or consists of a DNA sequence according to SEQ ID NO: 29, or a DNA sequence having, in increasing order of preference, at least 50%, 60%, 70%, 80%, 90%, 95%, 96%, 97%, 98%, or 99% sequence identity to the nucleic acid sequence according to SEQ ID NO: 29, or a fragment or variant thereof; or an RNA sequence according to SEQ ID NO: 30, or an RNA sequence having, in increasing order of preference, at least 50%, 60%, 70%, 80%, 90%, 95%, 96%, 97%, 98%, or 99% sequence identity to the nucleic acid sequence according to SEQ ID NO: 30, or a fragment or a variant thereof;
[0173] said 3′UTR element derived from a NDUFA1 gene comprises or consists of a DNA sequence according to SEQ ID NO: 31, or a DNA sequence having, in increasing order of preference, at least 50%, 60%, 70%, 80%, 90%, 95%, 96%, 97%, 98%, or 99% sequence identity to the nucleic acid sequence according to SEQ ID NO: 31, or a fragment or variant thereof; or an RNA sequence according to SEQ ID NO: 32, or an RNA sequence having, in increasing order of preference, at least 50%, 60%, 70%, 80%, 90%, 95%, 96%, 97%, 98%, or 99% sequence identity to the nucleic acid sequence according to SEQ ID NO: 32, or a fragment or a variant thereof; and/or
[0174] said 3′UTR element derived from a RPS9 gene comprises or consists of a DNA sequence according to SEQ ID NO: 33, or a DNA sequence having, in increasing order of preference, at least 50%, 60%, 70%, 80%, 90%, 95%, 96%, 97%, 98%, or 99% sequence identity to the nucleic acid sequence according to SEQ ID NO: 33, or a fragment or variant thereof; or an RNA sequence according to SEQ ID NO: 34, or an RNA sequence having, in increasing order of preference, at least 50%, 60%, 70%, 80%, 90%, 95%, 96%, 97%, 98%, or 99% sequence identity to the nucleic acid sequence according to SEQ ID NO: 34, or a fragment or a variant thereof.

### Coding Region

[0175] The artificial nucleic acid according to the invention comprises at least one coding region or coding sequence operably linked to—and typically flanked by—at least one 3′-UTR element and at least one 5′-UTR element as defined herein. The terms “coding sequence” or “cds” and “coding region” are used interchangeably herein to refer to a segment or portion of a nucleic acid that encodes a (gene) product of interest. Gene products are products of gene expression and include (poly-)peptides and nucleic acids, such as (protein-)coding RNAs (such as mRNAs) and non-(protein-)coding RNAs (such as tRNAs, rRNAs, microRNAs, siRNAs). Typically, the at least one coding region of the inventive artificial nucleic acid molecule may encode at least one (poly-)peptide or protein, hereinafter referred to as “(poly-)peptide or protein of interest”. Coding regions may typically be composed of exons bounded by a start codon (such as AUG) at their 5′-end and a stop codon (such as UAG, UAA or UGA) at their 3′ end. In the artificial nucleic acid molecules of the invention, the coding region is bounded by at least one 5′-UTR element and at least one 3′-UTR element as defined herein.

[0176] (Poly-)peptides or proteins of interest generally include any (poly-)peptide or protein that can be encoded by the nucleic acid sequence of the at least one coding region, and can be expressed under suitable conditions to yield a functional (poly-)peptide or protein product. In this context, the term “functional” means “capable of exerting a desired biological function” and/or “exhibiting a desired biological property”. (Poly-)peptides or proteins of interest can have various functions and include, for instance, antibodies, enzymes, signaling proteins, receptors, receptor ligands, peptide hormones, transport proteins, structural proteins, neurotransmitters, growth regulating factors, serum proteins, carriers, drugs, immunomodulators, oncogenes, tumor suppressors, toxins, tumor antigens, and others. These proteins can be post-translationally modified to be proteins, glycoproteins, lipoproteins, phosphoproteins, etc. Further, the invention envisages any of the disclosed (poly-)peptides or proteins in their naturally occurring (wild-type) form, as well as variants, fragments and derivatives thereof. The encoded (poly-)peptides and proteins may have different effects. Without being limited thereto, coding regions encoding therapeutic, antigenic and allergenic (poly-)peptides are particularly envisaged herein.

### Therapeutic (Poly-)Peptides or Proteins

[0177] The at least one coding region of the artificial nucleic acid molecule of the invention may encode at least one “therapeutic (poly-)peptide or protein”. The term “therapeutic (poly-)peptide or protein” refers to a (poly-)peptide or protein capable of mediating a desired diagnostic, prophylactic or therapeutic effect, preferably resulting in detection, prevention, amelioration and/or healing of a disease.

[0178] Preferably, artificial nucleic acid molecules according to the invention may comprise at least one coding region encoding a therapeutic protein replacing an absent, deficient or mutated protein; a therapeutic protein beneficial for treating inherited or acquired diseases; infectious diseases, or neoplasms e.g. cancer or tumor diseases); an adjuvant or immuno-stimulating therapeutic protein; a therapeutic antibody or an antibody fragment, variant or derivative; a peptide hormone; a gene editing agent; an immune checkpoint inhibitor; a T cell receptor, or a fragment, variant or derivative T cell receptor; and/or an enzyme.

[0179] “Therapeutic (poly-)peptides or proteins “replacing an absent, deficient or mutated protein” may be selected from any (poly-)peptide or protein exhibiting the desired biological properties and/or capable of exerting the desired biological function of a wild-type protein, whose absence, deficiency or mutation causes disease. Herein, “absent” means that protein expression from its encoding gene is prevented or abolished, typically to an extent that the protein is not detectable at its target site (i.e. cellular compartment, cell type, tissue or organ) in the affected subject's body. Protein expression can be affected at a variety of levels, and the “absence” or “lack of production” of a protein in an affected patient's body may be due to mutations in the encoding gene, e.g. epigenetic alterations or sequence mutations either its open reading frame or its regulatory elements (e.g. nonsense mutations or deletions leading to the hindrance or abrogation of gene transcription), defective mRNA processing (e.g. defective mRNA splicing, maturation or export from the nucleus), protein translation deficiencies, or errors in the protein folding, translocation (i.e. failure to correctly enter the secretory pathway) or transport (i.e. failure to correctly enter its destined export pathway) process. A protein “deficiency”, i.e. reduced amount of protein detectable at its target site (i.e. cellular compartment, cell type, tissue or organ) in the affected subject's body, may be caused by the same mechanisms accounting for complete lack of protein expression as exemplified above. However, the defects leading to a protein “deficiency” may not always completely prevent or abolish protein expression from the affected gene, but rather lead to reduced expression levels (e.g. in cases where one allele is affected, and the other one functions normally). The term “mutated” encompasses both amino acid sequence variants and differences in the post-translational modification of proteins. Protein “mutants” may typically be non-functional, or mis-functional and may exhibit aberrant folding, translocation or transport properties or profiles.

[0180] Therapeutic (poly-)peptides or proteins “beneficial for treating inherited or acquired diseases such as infectious diseases, or neoplasms e.g. cancer or tumor diseases, diseases of the blood and blood-forming organs, endocrine, nutritional and metabolic diseases, diseases of the nervous system, diseases of the circulatory system, diseases of the respiratory system, diseases of the digestive system, diseases of the skin and subcutaneous tissue, diseases of the musculoskeletal system and connective tissue, and diseases of the genitourinary system, irrespective of being inherited or acquired” include any (poly-)peptides or protein whose expression is capable of preventing, ameliorating, or healing an inherited or acquired diseases. Such (poly-)peptides or proteins may in principle exert their therapeutic function by exerting any suitable biological action or function. In some embodiments, such (poly-)peptides or proteins may preferably not act by replacing an absent, deficient or mutated protein and/or by inducing an immune or allergenic response. For instance, (poly-)peptides or proteins beneficial for treating inherited or acquired diseases such as infectious diseases, or neoplasms may include particularly preferred therapeutic proteins which are inter alia beneficial in the treatment of acquired or inherited metabolic or endocrine disorders selected from (in brackets the particular disease for which the therapeutic protein is used in the treatment): Acid sphingomyelinase (Niemann-Pick disease), Adipotide (obesity), Agalsidase-beta (human galactosidase A) (Fabry disease; prevents accumulation of lipids that could lead to renal and cardiovascular complications), Alglucosidase (Pompe disease (glycogen storage disease type II)), alpha-galactosidase A (alpha-GAL A, Agalsidase alpha) (Fabry disease), alpha-glucosidase (Glycogen storage disease (GSD), Morbus Pompe), alpha-L-iduronidase (mucopolysaccharidoses (MPS), Hurler syndrome, Scheie syndrome), alpha-N-acetylglucosaminidase (Sanfilippo syndrome), Amphiregulin (cancer, metabolic disorder), Angiopoietin ((Ang1, Ang2, Ang3, Ang4, ANGPTL2, ANGPTL3, ANGPTL4, ANGPTL5, ANGPTL6, ANGPTL7) (angiogenesis, stabilize vessels), Betacellulin (metabolic disorder), Beta-glucuronidase (Sly syndrome), Bone morphogenetic protein BMPs (BMP1, BMP2, BMP3, BMP4, BMP5, BMP6, BMP7, BMP8a, BMP8b, BMP10, BMP15) (regenerative effect, bone-related conditions, chronic kidney disease (CKD)), CLN6 protein (CLN6 disease—Atypical Late Infantile, Late Onset variant, Early Juvenile, Neuronal Ceroid Lipofuscinoses (NCL)), Epidermal growth factor (EGF) (wound healing, regulation of cell growth, proliferation, and differentiation), Epigen (metabolic disorder), Epiregulin (metabolic disorder), Fibroblast Growth Factor (FGF, FGF-1, FGF-2, FGF-3, FGF-4, FGF-5, FGF-6, FGF-7, FGF-8, FGF-9, FGF-10, FGF-11, FGF-12, FGF-13, FGF-14, FGF-16, FGF-17, FGF-17, FGF-18, FGF-19, FGF-20, FGF-21, FGF-22, FGF-23) (wound healing, angiogenesis, endocrine disorders, tissue regeneration), Galsulphase (Mucopolysaccharidosis VI), Ghrelin (irritable bowel syndrome (IBS), obesity, Prader-Willi syndrome, type II diabetes mellitus), Glucocerebrosidase (Gaucher's disease), GM-CSF (regenerative effect, production of white blood cells, cancer), Heparin-binding EGF-like growth factor (HB-EGF) (wound healing, cardiac hypertrophy and heart development and function), Hepatocyte growth factor HGF (regenerative effect, wound healing), Hepcidin (iron metabolism disorders, Beta-thalassemia), Human albumin (Decreased production of albumin (hypoproteinaemia), increased loss of albumin (nephrotic syndrome), hypovolaemia, hyperbilirubinaemia), Idursulphase (Iduronate-2-sulphatase) (Mucopolysaccharidosis II (Hunter syndrome)), Integrins alphaVbeta3, alphaVbeta5 and alpha5beta1 (Bind matrix macromolecules and proteinases, angiogenesis), Iuduronate sulfatase (Hunter syndrome), Laronidase (Hurler and Hurler-Scheie forms of mucopolysaccharidosis I), N-acetylgalactosamine-4-sulfatase (rhASB; galsulfase, Arylsulfatase A (ARSA), Arylsulfatase B (ARSB)) (arylsulfatase B deficiency, Maroteaux-Lamy syndrome, mucopolysaccharidosis VI), N-acetylglucosamine-6-sulfatase (Sanfilippo syndrome), Nerve growth factor (NGF, Brain-Derived Neurotrophic Factor (BDNF), Neurotrophin-3 (NT-3), and Neurotrophin 4/5 (NT-4/5) (regenerative effect, cardiovascular diseases, coronary atherosclerosis, obesity, type 2 diabetes, metabolic syndrome, acute coronary syndromes, dementia, depression, schizophrenia, autism, Rett syndrome, anorexia nervosa, bulimia nervosa, wound healing, skin ulcers, corneal ulcers, Alzheimer's disease), Neuregulin (NRG1, NRG2, NRG3, NRG4) (metabolic disorder, schizophrenia), Neuropilin (NRP-1, NRP-2) (angiogenesis, axon guidance, cell survival, migration), Obestatin (irritable bowel syndrome (IBS), obesity, Prader-Willi syndrome, type II diabetes mellitus), Platelet Derived Growth factor (PDGF (PDFF-A, PDGF-B, PDGF-C, PDGF-D) (regenerative effect, wound healing, disorder in angiogenesis, Arteriosclerosis, Fibrosis, cancer), TGF beta receptors (endoglin, TGF-beta 1 receptor, TGF-beta 2 receptor, TGF-beta 3 receptor) (renal fibrosis, kidney disease, diabetes, ultimately end-stage renal disease (ESRD), angiogenesis), Thrombopoietin (THPO) (Megakaryocyte growth and development factor (MGDF)) (platelets disorders, platelets for donation, recovery of platelet counts after myelosuppressive chemotherapy), Transforming Growth factor (TGF (TGF-a, TGF-beta (TGFbeta1, TGFbeta2, and TGFbeta3))) (regenerative effect, wound healing, immunity, cancer, heart disease, diabetes, Marfan syndrome, Loeys-Dietz syndrome), VEGF (VEGF-A, VEGF-B, VEGF-C, VEGF-D, VEGF-E, VEGF-F und PIGF) (regenerative effect, angiogenesis, wound healing, cancer, permeability), Nesiritide (Acute decompensated congestive heart failure), Trypsin (Decubitus ulcer, varicose ulcer, debridement of eschar, dehiscent wound, sunburn, meconium ileus), adrenocorticotrophic hormone (ACTH) (“Addison's disease, Small cell carcinoma, Adrenoleukodystrophy, Congenital adrenal hyperplasia, Cushing's syndrome, Nelson's syndrome, Infantile spasms), Atrial-natriuretic peptide (ANP) (endocrine disorders), Cholecystokinin (diverse), Gastrin (hypogastrinemia), Leptin (Diabetes, hypertriglyceridemia, obesity), Oxytocin (stimulate breastfeeding, non-progression of parturition), Somatostatin (symptomatic treatment of carcinoid syndrome, acute variceal bleeding, and acromegaly, polycystic diseases of the liver and kidney, acromegaly and symptoms caused by neuroendocrine tumors), Vasopressin (antidiuretic hormone) (diabetes insipidus), Calcitonin (Postmenopausal osteoporosis, Hypercalcaemia, Paget's disease, Bone metastases, Phantom limb pain, Spinal Stenosis), Exenatide (Type 2 diabetes resistant to treatment with metformin and a sulphonylurea), Growth hormone (GH), somatotropin (Growth failure due to GH deficiency or chronic renal insufficiency, Prader-Willi syndrome, Turner syndrome, AIDS wasting or cachexia with antiviral therapy), Insulin (Diabetes mellitus, diabetic ketoacidosis, hyperkalaemia), Insulin-like growth factor 1 IGF-1 (Growth failure in children with GH gene deletion or severe primary IGF1 deficiency, neurodegenerative disease, cardiovascular diseases, heart failure), Mecasermin rinfabate, IGF-1 analog (Growth failure in children with GH gene deletion or severe primary IGF1 deficiency, neurodegenerative disease, cardiovascular diseases, heart failure), Mecasermin, IGF-1 analog (Growth failure in children with GH gene deletion or severe primary IGF1 deficiency, neurodegenerative disease, cardiovascular diseases, heart failure), Pegvisomant (Acromegaly), Pramlintide (Diabetes mellitus, in combination with insulin), Teriparatide (human parathyroid hormone residues 1-34) (Severe osteoporosis), Becaplermin (Debridement adjunct for diabetic ulcers), Dibotermin-alpha (Bone morphogenetic protein 2) (Spinal fusion surgery, bone injury repair), Histrelin acetate (gonadotropin releasing hormone; GnRH) (Precocious puberty), Octreotide (Acromegaly, symptomatic relief of VIP-secreting adenoma and metastatic carcinoid tumours), and Palifermin (keratinocyte growth factor; KGF) (Severe oral mucositis in patients undergoing chemotherapy, wound healing), or an isoform, homolog, fragment, variant or derivative of any of these proteins.

[0181] These and other proteins are understood to be therapeutic, as they are meant to treat the subject by replacing its defective endogenous production of a functional protein in sufficient amounts.

[0182] Accordingly, such therapeutic proteins are typically mammalian, in particular human proteins.

[0183] For the treatment of acquired or inherited blood disorders, diseases of the circulatory system, diseases of the respiratory system, cancer or tumour diseases, infectious diseases or immunodeficiencies, the following therapeutic proteins may be used (in brackets is the particular disease for which a use of the therapeutic protein is indicated for treatment): Alteplase (tissue plasminogen activator; tPA) (Pulmonary embolism, myocardial infarction, acute ischaemic stroke, occlusion of central venous access devices), Anistreplase (Thrombolysis), Antithrombin III (AT-III) (Hereditary AT-III deficiency, Thromboembolism), Bivalirudin (Reduce blood-clotting risk in coronary angioplasty and heparin-induced thrombocytopaenia), Darbepoetin-alpha (Treatment of anaemia in patients with chronic renal insufficiency and chronic renal failure (+/− dialysis)), Drotrecogin-alpha (activated protein C) (Severe sepsis with a high risk of death), Erythropoietin, Epoetin-alpha, erythropoetin, erthropoyetin (Anaemia of chronic disease, myleodysplasia, anaemia due to renal failure or chemotherapy, preoperative preparation), Factor IX (Haemophilia B), Factor VIIa (Haemorrhage in patients with haemophilia A or B and inhibitors to factor VIII or factor IX), Factor VIII (Haemophilia A), Lepirudin (Heparin-induced thrombocytopaenia), Protein C concentrate (Venous thrombosis, Purpura fulminans), Reteplase (deletion mutein of tPA) (Management of acute myocardial infarction, improvement of ventricular function), Streptokinase (Acute evolving transmural myocardial infarction, pulmonary embolism, deep vein thrombosis, arterial thrombosis or embolism, occlusion of arteriovenous cannula), Tenecteplase (Acute myocardial infarction), Urokinase (Pulmonary embolism), Angiostatin (Cancer), Anti-CD22 immunotoxin (Relapsed CD33+ acute myeloid leukaemia), Denileukin diftitox (Cutaneous T-cell lymphoma (CTCL)), Immunocyanin (bladder and prostate cancer), MPS (Metallopanstimulin) (Cancer), Aflibercept (Non-small cell lung cancer (NSCLC), metastatic colorectal cancer (mCRC), hormone-refractory metastatic prostate cancer, wet macular degeneration), Endostatin (Cancer, inflammatory diseases like rheumatoid arthritis as well as Crohn's disease, diabetic retinopathy, psoriasis, and endometriosis), Collagenase (Debridement of chronic dermal ulcers and severely burned areas, Dupuytren's contracture, Peyronie's disease), Human deoxy-ribonuclease I, dornase (Cystic fibrosis; decreases respiratory tract infections in selected patients with FVC greater than 40% of predicted), Hyaluronidase (Used as an adjuvant to increase the absorption and dispersion of injected drugs, particularly anaesthetics in ophthalmic surgery and certain imaging agents), Papain (Debridement of necrotic tissue or liquefication of slough in acute and chronic lesions, such as pressure ulcers, varicose and diabetic ulcers, burns, postoperative wounds, pilonidal cyst wounds, carbuncles, and other wounds), L-Asparaginase (Acute lymphocytic leukaemia, which requires exogenous asparagine for proliferation), Peg-asparaginase (Acute lymphocytic leukaemia, which requires exogenous asparagine for proliferation), Rasburicase (Paediatric patients with leukaemia, lymphoma, and solid tumours who are undergoing anticancer therapy that may cause tumour lysis syndrome), Human chorionic gonadotropin (HCG) (Assisted reproduction), Human follicle-stimulating hormone (FSH) (Assisted reproduction), Lutropin-alpha (Infertility with luteinizing hormone deficiency), Prolactin (Hypoprolactinemia, serum prolactin deficiency, ovarian dysfunction in women, anxiety, arteriogenic erectile dysfunction, premature ejaculation, oligozoospermia, asthenospermia, hypofunction of seminal vesicles, hypoandrogenism in men), alpha-1-Proteinase inhibitor (Congenital antitrypsin deficiency), Lactase (Gas, bloating, cramps and diarrhoea due to inability to digest lactose), Pancreatic enzymes (lipase, amylase, protease) (Cystic fibrosis, chronic pancreatitis, pancreatic insufficiency, post-Billroth II gastric bypass surgery, pancreatic duct obstruction, steatorrhoea, poor digestion, gas, bloating), Adenosine deaminase (pegademase bovine, PEG-ADA) (Severe combined immunodeficiency disease due to adenosine deaminase deficiency), Abatacept (Rheumatoid arthritis (especially when refractory to TNFa inhibition)), Alefacept (Plaque Psoriasis), Anakinra (Rheumatoid arthritis), Etanercept (Rheumatoid arthritis, polyarticular-course juvenile rheumatoid arthritis, psoriatic arthritis, ankylosing spondylitis, plaque psoriasis, ankylosing spondylitis), Interleukin-1 (IL-1) receptor antagonist, Anakinra (inflammation and cartilage degradation associated with rheumatoid arthritis), Thymulin (neurodegenerative diseases, rheumatism, anorexia nervosa), TNF-alpha antagonist (autoimmune disorders such as rheumatoid arthritis, ankylosing spondylitis, Crohn's disease, psoriasis, hidradenitis suppurativa, refractory asthma), Enfuvirtide (HIV-1 infection), and Thymosin alpha1 (Hepatitis B and C), or an isoform, homolog, fragment, variant or derivative of any of these proteins.

[0184] Further therapeutic (poly-)peptides or proteins may be selected from: 0ATL3, 0FC3, 0PA3, 0PD2, 4-1BBL, 5T4, 6Ckine, 707-AP, 9D7, A2M, AA, AAAS, AACT, AASS, ABAT, ABCA1, ABCA4, ABCB1, ABCB11, ABCB2, ABCB4, ABCB7, ABCC2, ABCC6, ABCC8, ABCD1, ABCD3, ABCG5, ABCG8, ABL1, ABO, ABR ACAA1, ACACA, ACADL, ACADM, ACADS, ACADVL, ACAT1, ACCPN, ACE, ACHE, ACHM3, ACHM1, ACLS, ACPI, ACTA1, ACTC, ACTN4, ACVRL1, AD2, ADA, ADAMTS13, ADAMTS2, ADFN, ADH1B, ADH1C, ADLDH3A2, ADRB2, ADRB3, ADSL, AEZ, AFA, AFD1, AFP, AGA, AGL, AGMX2, AGPS, AGS1, AGT, AGTR1, AGXT, AH02, AHCY, AHDS, AHHR, AHSG, AIC, AIED, AIH2, AIH3, AIM-2, AIPL1, AIRE, AK1, ALAD, ALAS2, ALB, HPG1, ALDH2, ALDH3A2, ALDH4A1, ALDH5A1, ALDH1A1, ALDOA, ALDOB, ALMS1, ALPL, ALPP, ALS2, ALX4, AMACR, AMBP, AMCD, AMCD1, AMCN, AMELX, AMELY, AMGL, AMH, AMHR2, AMPD3, AMPD1, AMT, ANC, ANCR, ANK1, ANOP1, AOM, AP0A4, AP0C2, AP0C3, AP3B1, APC, aPKC, APOA2, APOA1, APOB, APOC3, APOC2, APOE, APOH, APP, APRT, APS1, AQP2, AR, ARAF1, ARG1, ARHGEF12, ARMET, ARSA, ARSB, ARSC2, ARSE, ART-4, ARTC1/m, ARTS, ARVD1, ARX, AS, ASAH, ASAT, ASD1, ASL, ASMD, ASMT, ASNS, ASPA, ASS, ASSP2, ASSP5, ASSP6, AT3, ATD, ATHS, ATM, ATP2A1, ATP2A2, ATP2C1, ATP6B1, ATP7A, ATP7B, ATP8B1, ATPSK2, ATRX, ATXN1, ATXN2, ATXN3, AUTS1, AVMD, AVP, AVPR2, AVSD1, AXIN1, AXIN2, AZF2, B2M, B4GALT7, B7H4, BAGE, BAGE-1, BAX, BBS2, BBS3, BBS4, BCA225, BCAA, BCH, BCHE, BCKDHA, BCKDHB, BCL10, BCL2, BCL3, BCL5, BCL6, BCPM, BCR, BCR/ABL, BDC, BDE, BDMF, BDMR, BEST1, beta-Catenin/m, BF, BFHD, BFIC, BFLS, BFSP2, BGLAP, BGN, BHD, BHR1, BING-4, BIRC5, BJS, BLM, BLMH, BLNK, BMPR2, BPGM, BRAF, BRCA1, BRCA1/m, BRCA2, BRCA2/m, BRCD2, BRCD1, BRDT, BSCL, BSCL2, BTAA, BTD, BTK, BUB1, BWS, BZX, C0L2A1, C0L6A1, C1NH, C1QA, C1QB, C1QG, CIS, C2, C3, C4A, C4B, C5, C6, C7, C7orf2, C8A, C8B, C9, CA125, CA15-3/CA 27-29, CA195, CA19-9, CA72-4, CA2, CA242, CA50, CABYR, CACD, CACNA2D1, CACNA1A, CACNA1F, CACNA1S, CACNB2, CACNB4, CAGE, CA1, CALB3, CALCA, CALCR, CALM, CALR, CAM43, CAMEL, CAP-1, CAPN3, CARD15, CASP-5/m, CASP-8, CASP-8/m, CASR, CAT, CATM, CAV3, CB1, CBBM, CBS, CCA1, CCAL2, CCAL1, CCAT, CCL-1, CCL-11, CCL-12, CCL-13, CCL-14, CCL-15, CCL-16, CCL-17, CCL-18, CCL-19, CCL-2, CCL-20, CCL-21, CCL-22, CCL-23, CCL-24, CCL-25, CCL-27, CCL-3, CCL-4, CCL-5, CCL-7, CCL-8, CCM1, CCNB1, CCND1, CCO, CCR2, CCR5, CCT, CCV, CCZS, CD1, CD19, CD20, CD22, CD25, CD27, CD27L, cD3, CD30, CD30, CD30L, CD33, CD36, CD3E, CD3G, CD3Z, CD4, CD40, CD40L, CD44, CD44v, CD44v6, CD52, CD55, CD56, CD59, CD80, CD86, CDAN1, CDAN2, CDAN3, CDC27, CDC27/m, CDC2L1, CDH1, CDK4, CDK4/m, CDKN1C, CDKN2A, CDKN2A/m, CDKN1A, CDKN1C, CDL1, CDPD1, CDR1, CEA, CEACAM1, CEACAM5, CECR, CECR9, CEPA, CETP, CFNS, CFTR, CGF1, CHAC, CHED2, CHED1, CHEK2, CHM, CHML, CHR39C, CHRNA4, CHRNA1, CHRNB1, CHRNE, CHS, CHS1, CHST6, CHX10, CIAS1, CIDX, CKN1, CLA2, CLA3, CLA1, CLCA2, CLCN1, CLCN5, CLCNKB, CLDN16, CLP, CLN2, CLN3, CLN4, CLN5, CLN6, CLN8, C1QA, C1QB, C1QG, C1R, CLS, CMCWTD, CMDJ, CMD1A, CMD1B, CMH2, MH3, CMH6, CMKBR2, CMKBR5, CML28, CML66, CMM, CMT2B, CMT2D, CMT4A, CMT1A, CMTX2, CMTX3, C-MYC, CNA1, CND, CNGA3, CNGA1, CNGB3, CNSN, CNTF, COA-1/m, COCH, COD2, COD1, COH1, COL10A, COL2A2, COL11A2, COL17A1, COL1A1, COL1A2, COL2A1, COL3A1, COL4A3, COL4A4, COL4A5, COL4A6, COL5A1, COL5A2, COL6A1, COL6A2, COL6A3, COL7A1, COL8A2, COL9A2, COL9A3, COL11A1, COL1A2, COL23A1, COL1A1, COLQ, COMP, COMT, CORD5, CORD1, COX10, COX-2, CP, CPB2, CPO, CPP, CPS1, CPT2, CPT1A, CPX, CRAT, CRB1, CRBM, CREBBP, CRH, CRHBP, CRS, CRV, CRX, CRYAB, CRYBA1, CRYBB2, CRYGA, CRYGC, CRYGD, CSA, CSE, CSF1R, CSF2RA, CSF2RB, CSF3R, CSF1R, CST3, CSTB, CT, CT7, CT-9/BRD6, CTAA1, CTACK, CTEN, CTH, CTHM, CTLA4, CTM, CTNNB1, CTNS, CTPA, CTSB, CTSC, CTSK, CTSL, CTS1, CUBN, CVD1, CX3CL1, CXCL1, CXCL10, CXCL11, CXCL12, CXCL13, CXCL16, CXCL2, CXCL3, CXCL4, CXCL5, CXCL6, CXCL7, CXCL8, CXCL9, CYB5, CYBA, CYBB, CYBB5, CYFRA 21-1, CYLD, CYLD1, CYMD, CYP11B1, CYP11B2, CYP17, CYP17A1, CYP19, CYP19A1, CYP1A2, CYP1B1, CYP21A2, CYP27A1, CYP27B1, CYP2A6, CYP2C, CYP2C19, CYP2C9, CYP2D, CYP2D6, CYP2D7P1, CYP3A4, CYP7B1, CYPB1, CYP11B1, CYP1A1, CYP1B1, CYRAA, D40, DADI, DAM, DAM-10/MAGE-B1, DAM-6/MAGE-B2, DAX1, DAZ, DBA, DBH, DBI, DBT, DCC, DC-CK1, DCK, DCR, DCX, DDB 1, DDB2, DDIT3, DDU, DECR1, DEK-CAN, DEM, DES, DF, DFN2, DFN4, DFN6, DFNA4, DFNA5, DFNB5, DGCR, DHCR7, DHFR, DHOF, DHS, DIA1, DIAPH2, DIAPH1, DIH1, DIO1, DISCI, DKC1, DLAT, DLD, DLL3, DLX3, DMBT1, DMD, DM1, DMPK, DMWD, DNAI1, DNASE1, DNMT3B, DPEP1, DPYD, DPYS, DRD2, DRD4, DRPLA, DSCR1, DSG1, DSP, DSPP, DSS, DTDP2, DTR, DURS1, DWS, DYS, DYSF, DYT2, DYT3, DYT4, DYT2, DYT1, DYX1, EBAF, EBM, EBNA, EBP, EBR3, EBS1, ECA1, ECB2, ECE1, ECGF1, ECT, ED2, ED4, EDA, EDAR, ECA1, EDN3, EDNRB, EEC1, EEF1A1L14, EEGV1, EFEMP1, EFTUD2/m, EGFR, EGFR/Her1, EGI, EGR2, EIF2AK3, eIF4G, EKV, EI IS, ELA2, ELF2, ELF2M, ELK1, ELN, ELONG, EMD, EML1, EMMPRIN, EMX2, ENA-78, ENAM, END3, ENG, ENO1, ENPP1, ENUR2, ENUR1, EOS, EP300, EPB41, EPB42, EPCAM, EPD, EphA1, EphA2, EphA3, EphrinA2, EphrinA3, EPHX1, EPM2A, EPO, EPOR, EPX, ERBB2, ERCC2 ERCC3, ERCC4, ERCC5, ERCC6, ERVR, ESR1, ETFA, ETFB, ETFDH, ETM1, ETV6-AML1, ETV1, EVC, EVR2, EVR1, EWSR1, EXT2, EXT3, EXT1, EYA1, EYCL2, EYCL3, EYCL1, EZH2, F10, F11, F12, F13A1, F13B, F2, F5, F5F8D, F7, F8, F8C, F9, FABP2, FACL6, FAH, FANCA, FANCB, FANCC, FANCD2, FANCF, FasL, FBN2, FBN1, FBP1, FCG3RA, FCGR2A, FCGR2B, FCGR3A, FCHL, FCMD, FCP1, FDPSL5, FECH, FEO, FEOM1, FES, FGA, FGB, FGD1, FGF2, FGF23, FGF5, FGFR2, FGFR3, FGFR1, FGG, FGS1, FH, FIC1, FIH, F2, FKBP6, FLNA, FLT4, FMO3, FMO4, FMR2, FMR1, FN, FN1/m, FOXC1, FOXE1, FOXL2, FOXO1A, FPDMM, FPF, Fra-1, FRAXF, FRDA, FSHB, FSHMD1A, FSHR, FTH1, FTHL17, FTL, FTZF1, FUCA1, FUT2, FUT6, FUT1, FY, G250, G250/CAIX, G6PC, G6PD, G6PT1, G6PT2, GAA, GABRA3, GAGE-1, GAGE-2, GAGE-3, GAGE-4, GAGE-5, GAGE-6, GAGE-7b, GAGE-8, GALC, GALE, GALK1, GALNS, GALT, GAMT, GAN, GAST, GASTRIN17, GATA3, GATA, GBA, GBE, GC, GCDH, GCGR, GCH1, GCK, GCP-2, GCS1, G-CSF, GCSH, GCSL, GCY, GDEP, GDF5, GDI1, GDNF, GDXY, GFAP, GFND, GGCX, GGT1, GH2, GH1, GHR, GHRHR, GHS, GIF, GINGF, GIP, GJA3, GJA8, GJB2, GJB3, GJB6, GJB1, GK, GLA, GLB, GLB1, GLC3B, GLC1B, GLC1C, GLDC, GLI3, GLP1, GLRA1, GLUD1, GM1 (fuc-GM1), GM2A, GM-CSF, GMPR, GNAI2, GNAS, GNAT1, GNB3, GNE, GNPTA, GNRH, GNRH1, GNRHR, GNS, GnT-V, gp100, GP1BA, GP1BB, GP9, GPC3, GPD2, GPDS1, GPI, GP1BA, GPN1LW, GPNMB/m, GPSC, GPX1, GRHPR, GRK1, GROα, GROβ, GROγ, GRPR, GSE, GSM1, GSN, GSR, GSS, GTD, GTS, GUCA1A, GUCY2D, GULOP, GUSB, GUSM, GUST, GYPA, GYPC, GYS1, GYS2, HOKPP2, HOMG2, HADHA, HADHB, HAGE, HAGH, HAL, HAST-2, HB 1, HBA2, HBA1, HBB, HBBP1, HBD, HBE1, HBG2, HBG1, HBHR, HBP1, HBQ1, HBZ, HBZP, HCA, HCC-1, HCC-4, HCF2, HCG, HCL2, HCL1, HCR, HCVS, HD, HPN, HER2, HER2/NEU, HER3, HERV-K-MEL, HESX1, HEXA, HEXB, HF1, HFE, HF1, HGD, HHC2, HHC3, HHG, HK1 HLA-A, HLA-A*0201-R170I, HLA-A11/m, HLA-A2/m, HLA-DPB1 HLA-DRA, HLCS, HLXB9, HMBS, HMGA2, HMGCL, HMI, HMN2, HMOX1, HMS1 HMW-MAA, HND, HNE, HNF4A, HOAC, HOMEOBOX NKX 3.1, HOM-TES-14/SCP-1, HOM-TES-85, HOXA1 HOXD13, HP, HPC1, HPD, HPE2, HPE1, HPFH, HPFH2, HPRT1, HPS1, HPT, HPV-E6, HPV-E7, HR, HRAS, HRD, HRG, HRPT2, HRPT1, HRX, HSD11B2, HSD17B3, HSD17B4, HSD3B2, HSD3B3, HSN1, HSP70-2M, HSPG2, HST-2, HTC2, HTC1, hTERT, HTN3, HTR2C, HVBS6, HVBS1, HVEC, HV1S, HYAL1, HYR, I-309, IAB, IBGC1, IBM2, ICAM1, ICAM3, iCE, ICHQ, ICR5, ICR1, ICS 1, IDDM2, IDDM1, IDS, IDUA, IF, IFNa/b, IFNGR1, IGAD1, IGER, IGF-1R, IGF2R, IGF1, IGH, IGHC, IGHG2, IGHG1, IGHM, IGHR, IGKC, IHG1, IHH, IKBKG, IL1, IL-1 RA, IL10, IL-11, IL12, IL12RB1, IL13, IL-13Ralpha2, IL-15, IL-16, IL-17, IL18, IL-1a, IL-1alpha, IL-1b, IL-1beta, IL1RAPL1, IL2, IL24, IL-2R, IL2RA, IL2RG, IL3, IL3RA, IL4, IL4R, IL4R, IL-5, IL6, IL-7, IL7R, IL-8, IL-9, Immature laminin receptor, IMMP2L, INDX, INFGR1, INFGR2, INFalpha, IFNbeta, INFgamma, INS, INSR, INVS, IP-10, IP2, IPF1, IP1, IRF6, IRS1, ISCW, ITGA2, ITGA2B, ITGA6, ITGA7, ITGB2, ITGB3, ITGB4, ITIH1, ITM2B, IV, IVD, JAG1, JAK3, JBS, JBTS1, JMS, JPD, KAL1, KAL2, KALI, KLK2, KLK4, KCNA1, KCNE2, KCNE1, KCNH2, KCNJ1, KCNJ2, KCNJ1, KCNQ2, KCNQ3, KCNQ4, KCNQ1, KCS, KERA, KFM, KFS, KFSD, KHK, ki-67, KIAA0020, KIAA0205, KIAA0205/m, KIF1B, KIT, KK-LC-1, KLK3, KLKB1, KM-HN-1, KMS, KNG, KNO, K-RAS/m, KRAS2, KREV1, KRT1, KRT10, KRT12, KRT13, KRT14, KRT14L1, KRT14L2, KRT14L3, KRT16, KRT16L1, KRT16L2, KRT17, KRT18, KRT2A, KRT3, KRT4, KRT5, KRT6 A, KRT6B, KRT9, KRTHB1, KRTHB6, KRT1, KSA, KSS, KWE, KYNU, L0H19CR1, L1CAM, LAGE, LAGE-1, LALL, LAMA2, LAMA3, LAMB3, LAMB1, LAMC2, LAMP2, LAP, LCA5, LCAT, LCCS, LCCS 1, LCFS2, LCS1, LCT, LDHA, LDHB, LDHC, LDLR, LDLR/FUT, LEP, LEWISY, LGCR, LGGF-PBP, LGI1, LGMD2H, LGMD1A, LGMD1B, LHB, LHCGR, LHON, LHRH, LHX3, LIF, LIG1, LIMM, LIMP2, LIPA, LIPA, LIPB, LIPC, LIVIN, L1CAM, LMAN1, LMNA, LMX1B, LOLR, LOR, LOX, LPA, LPL, LPP, LQT4, LRP5, LRS 1, LSFC, LT-beta, LTBP2, LTC4S, LYL1, XCL1, LYZ, M344, MA50, MAA, MADH4, MAFD2, MAFD1, MAGE, MAGE-A1, MAGE-A10, MAGE-A12, MAGE-A2, MAGE-A3, MAGE-A4, MAGE-A6, MAGE-A9, MAGEB1, MAGE-B10, MAGE-B16, MAGE-B17, MAGE-B2, MAGE-B3, MAGE-B4, MAGE-B5, MAGE-B6, MAGE-C1, MAGE-C2, MAGE-C3, MAGE-D1, MAGE-D2, MAGE-D4, MAGE-E1, MAGE-E2, MAGE-F1, MAGE-H1, MAGEL2, MGB1, MGB2, MAN2A1, MAN2B1, MANBA, MANBB, MAOA, MAOB, MAPK8IP1, MAPT, MART-1, MART-2, MART2/m, MAT1A, MBL2, MBP, MBS1, MC1R, MC2R, MC4R, MCC, MCCC2, MCCC1, MCDR1, MCF2, MCKD, MCL1, MC1R, MCOLN1, MCOP, MCOR, MCP-1, MCP-2, MCP-3, MCP-4, MCPH2, MCPH1, MCS, M-CSF, MDB, MDCR, MDM2, MDRV, MDS 1, ME1, ME1/m, ME2, ME20, ME3, MEAX, MEB, MEC CCL-28, MECP2, MEFV, MELANA, MELAS, MEN1 MSLN, MET, MF4, MG50, MG50/PXDN, MGAT2, MGAT5, MGC1 MGCR, MGCT, MGI, MGP, MHC2TA, MHS2, MHS4, MIC2, MIC5, MIDI, MIF, MIP, MIP-5/HCC-2, MITF, MJD, MKI67, MKKS, MKS1, MLH1, MLL, MLLT2, MLLT3, MLLT7, MLLT1, MLS, MLYCD, MMA1a, MMP 11, MMVP1, MN/CA IX-Antigen, MNG1, MN1, MOC31, MOCS2, MOCS1, MOG, MORC, MOS, MOV18, MPD1, MPE, MPFD, MPI, MPIF-1, MPL, MPO, MPS3C, MPZ, MRE11A, MROS, MRP1, MRP2, MRP3, MRSD, MRX14, MRX2, MRX20, MRX3, MRX40, MRXA, MRX1, MS, MS4A2, MSD, MSH2, MSH3, MSH6, MSS, MSSE, MSX2, MSX1, MTATP6, MTC03, MTCO1, MTCYB, MTHFR, MTM1, MTMR2, MTND2, MTND4, MTND5, MTND6, MTND1, MTP, MTR, MTRNR2, MTRNR1, MTRR, MTTE, MTTG, MTTI, MTTK, MTTL2, MTTL1, MTTN, MTTP, MTTS1, MUC1, MUC2, MUC4, MUC5AC, MUM-1, MUM-1/m, MUM-2, MUM-2/m, MUM-3, MUM-3/m, MUT, mutant p21 ras, MUTYH, MVK, MX2, MXI1, MY05A, MYB, MYBPC3, MYC, MYCL2, MYH6, MYH7, MYL2, MYL3, MYMY, MYO15A, MYO1G, MYO5A, MYO7A, MYOC, Myosin/m, MYP2, MYP1, NA88-A, N-acetylglucosaminyltransferase-V, NAGA, NAGLU, NAMSD, NAPB, NAT2, NAT, NBIA1, NBS1, NCAM, NCF2, NCF1, NDN, NDP, NDUFS4, NDUFS7, NDUFS8, NDUFV1, NDUFV2, NEB, NEFH, NEM1, Neo-PAP, neo-PAP/m, NEU1, NEUROD1, NF2, NF1, NFYC/m, NGEP, NHS, NKS1, NKX2E, NM, NME1, NMP22, NMTC, NODAL, NOG, NOS3, NOTCH3, NOTCH1, NP, NPC2, NPC1, NPHL2, NPHP1, NPHS2, NPHS1, NPM/ALK, NPPA, NQO1, NR2E3, NR3C1, NR3C2, NRAS, NRAS/m, NRL, NROB1, NRTN, NSE, NSX, NTRK1, NUMA1, NXF2, NY-CO1, NY-ESO1, NY-ESO-B, NY-LU-12, ALDOA, NYS2, NYS4, NY-SAR-35, NYS1, NYX, OA3, OA1, OAP, OASD, OAT, OCA1, OCA2, OCD1, OCRL, OCRL1, OCT, ODDD, ODT1, OFC1, OFD1, OGDH, OGT, OGT/m, OPA2, OPA1, OPD1, OPEM, OPG, OPN, OPN1LW, OPN1MW, OPN1SW, OPPG, OPTB1, TTD, ORM1, ORP1, OS-9, OS-9/m, OSM LIF, OTC, OTOF, OTSC1, OXCT1, OYTES1, P15, P190 MINOR BCR-ABL, P2RY12, P3, P16, P40, P4HB, P-501, P53, P53/m, P97, PABPN1, PAFAH1B1, PAFAH1P1, PAGE-4, PAGE-5, PAH, PAI-1, PAI-2, PAK3, PAP, PAPPA, PARK2, PART-1, PATE, PAX2, PAX3, PAX6, PAX7, PAX8, PAX9, PBCA, PBCRA1, PBT, PBX1, PBXP1, PC, PCBD, PCCA, PCCB, PCK2, PCK1, PCLD, PCOS1, PCSK1, PDB1, PDCN, PDE6A, PDE6B, PDEF, PDGFB, PDGFR, PDGFRL, PDHA1, PDR, PDX1, PECAM1, PEE1, PEO1, PEPD, PEX10, PEX12, PEX13, PEX3, PEX5, PEX6, PEX7, PEX1, PF4, PFB1, PFC, PFKFB1, PFKM, PGAM2, PGD, PGK1, PGK1P1, PGL2, PGR, PGS, PHA2A, PHB, PHEX, PHGDH, PHKA2, PHKA1, PHKB, PHKG2, PHP, PHYH, PI, PI3, PIGA, PIM1-KINASE, PIN1, PIP5K1B, PITX2, PITX3, PKD2, PKD3, PKD1, PKDTS, PKHD1, PKLR, PKP1, PKU1, PLA2G2A, PLA2G7, PLAT, PLEC1, PLG, PLI, PLOD, PLP1, PMEL17, PML, PML/RARalpha, PMM2, PMP22, PMS2, PMS1, PNKD, PNLIP, POF1, POLA, POLH, POMC, PON2, PON1, PORC, POTE, POU1F1, POU3F4, POU4F3, POU1F1, PPAC, PPARG, PPCD, PPGB, PPH1, PPKB, PPMX, PPOX, PPP1R3A, PPP2R2B, PPT1, PRAME, PRB, PRB3, PRCA1, PRCC, PRD, PRDX5/m, PRF1, PRG4, PRKAR1A, PRKCA, PRKDC, PRKWNK4, PRNP, PROC, PRODH, PROM1, PROP1, PROS1, PRST, PRP8, PRPF31, PRPF8, PRPH2, PRPS2, PRPS1, PRS, PRSS7, PRSS1, PRTN3, PRX, PSA, PSAP, PSCA, PSEN2, PSEN1, PSG1, PSGR, PSM, PSMA, PSORS1, PTC, PTCH, PTCH1, PTCH2, PTEN, PTGS1, PTH, PTHR1, PTLAH, PTOS1, PTPN12, PTPNI l, PTPRK, PTPRK/m, PTS, PUJO, PVR, PVRL1, PWCR, PXE, PXMP3, PXR1, PYGL, PYGM, QDPR, RAB27A, RAD54B, RAD54L, RAG2, RAGE, RAGE-1, RAG1, RAP1, RARA, RASA1, RBAF600/m, RB1, RBP4, RBP4, RBS, RCA1, RCAS1, RCCP2, RCD1, RCV1, RDH5, RDPA, RDS, RECQL2, RECQL3, RECQL4, REG1A, REHOBE, REN, RENBP, RENS1, RET, RFX5, RFXANK, RFXAP, RGR, RHAG, RHAMM/CD168, RHD, RHO, Rip-1, RLBP1, RLN2, RLN1, RLS, RMD1, RMRP, ROM1, ROR2, RP, RP1, RP14, RP17, RP2, RP6, RP9, RPD1, RPE65, RPGR, RPGRIP1, RP1, RP10, RPS19, RPS2, RPS4X, RPS4Y, RPS6KA3, RRAS2, RS1, RSN, RSS, RU1, RU2, RUNX2, RUNXI, RWS, RYR1, S-100, SAA1, SACS, SAG, SAGE, SALL1, SARDH, SART1, SART2, SART3, SAS, SAX1, SCA2, SCA4, SCA5, SCA7, SCA8, SCA1, SCC, SCCD, SCF, SCLC1, SCN1A, SCN1B, SCN4A, SCN5A, SCNN1A, SCNN1B, SCNN1G, SCO2, SCP1, SCZD2, SCZD3, SCZD4, SCZD6, SCZD1, SDF-1alpha/beta, SDHA, SDHD, SDYS, SEDL, SERPENA7, SERPINA3, SERPINA6, SERPINA1, SERPINC1, SERPIND1, SERPINE1, SERPINF2, SERPING1, SERPINI1, SFTPA1, SFTPB, SFTPC, SFTPD, SGCA, SGCB, SGCD, SGCE, SGM1, SGSH, SGY-1, SH2D1A, SHBG, SHFM2, SHFM3, SHFM1, SHH, SHOX, SI, SIAL, SIALYL LEWISX, SIASD, S11, SIM1, SIRT2/m, SIX3, SJS1, SKP2, SLC10A2, SLC12A1, SLC12A3, SLC17A5, SLC19A2, SLC22A1L, SLC22A5, SLC25A13, SLC25A15, SLC25A20, SLC25A4, SLC25A5, SLC25A6, SLC26A2, SLC26A3, SLC26A4, SLC2A1, SLC2A2, SLC2A4, SLC3A1, SLC4A1, SLC4A4, SLC5A1, SLC5A5, SLC6A2, SLC6A3, SLC6A4, SLC7A7, SLC7A9, SLC11A1, SLOS, SMA, SMAD1, SMAL, SMARCB1, SMAX2, SMCR, SMCY, SM1, SMN2, SMN1, SMPD1, SNCA, SNRPN, SOD2, SOD3, SOD1, SOS1, SOST, SOX9, SOX10, Sp17, SPANXC, SPG23, SPG3A, SPG4, SPG5A, SPG5B, SPG6, SPG7, SPINK1, SPINK5, SPPK, SPPM, SPSMA, SPTA1, SPTB, SPTLC1, SRC, SRD5A2, SRPX, SRS, SRY, ßhCG, SSTR2, SSX1, SSX2 (HOM-MEL-40/SSX2), SSX4, ST8, STAMP-1, STAR, STARP1, STATH, STEAP, STK2, STK11, STn/KLH, STO, STOM, STS, SUOX, SURF1, SURVIVIN-2B, SYCP1, SYM1, SYN1, SYNS1, SYP, SYT/SSX, SYT-SSX-1, SYT-SSX-2, TA-90, TAAL6, TACSTD1, TACSTD2, TAG72, TAF7L, TAF1, TAGE, TAG-72, TALI, TAM, TAP2, TAP1, TAPVR1, TARC, TARP, TAT, TAZ, TBP, TBX22, TBX3, TBX5, TBXA2R, TBXAS1, TCAP, TCF2, TCF1, TCIRG1, TCL2, TCL4, TCL1A, TCN2, TCOF1, TCR, TCRA, TDD, TDFA, TDRD1, TECK, TECTA, TEK, TEL/AML1, TELAB1, TEX15, TF, TFAP2B, TFE3, TFR2, TG, TGFalpha, TGFbeta, TGFbetaI, TGFbeta1, TGFbetaR2, TGFbetaRE, TGFgamma, TGFbetaRII, TGIF, TGM-4, TGM1, TH, THAS, THBD, THC, THC2, THM, THPO, THRA, THRB, TIMM8A, TIMP2, TIMP3, TIMP1, TITF1, TKCR, TKT, TLP, TLR1, TLR10, TLR2, TLR3, TLR4, TLR4, TLR5, TLR6, TLR7, TLR8, TLR9, TLX1, TM4SF1, TM4SF2, TMC1, TMD, TMIP, TNDM, TNF, TNFRSF11A, TNFRSF1A, TNFRSF6, TNFSF5, TNFSF6, TNFalpha, TNFbeta, TNNI3, TNNT2, TOC, TOP2A, TOP1, TP53, TP63, TPA, TPBG, TPI, TPI/m, TPI1, TPM3, TPM1, TPMT, TPO, TPS, TPTA, TRA, TRAG3, TRAPPC2, TRC8, TREH, TRG, TRH, TRIM32, TRIM37, TRP1, TRP2, TRP-2/6b, TRP-2/INT2, Trp-p8, TRPS1, TS, TSC2, TSC3, TSC1, TSG101, TSHB, TSHR, TSP-180, TST, TTGA2B, TTN, TTPA, TTR, TU M2-PK, TULP1, TWIST, TYH, TYR, TYROBP, TYROBP, TYRP1, TYS, UBE2A, UBE3A, UBE1, UCHL1, UFS, UGT1A, ULR, UMPK, UMPS, UOX, UPA, UQCRC1, URO5, UROD, UPK1B, UROS, USH2A, USH3A, USH1A, USH1C, USP9Y, UV24, VBCH, VCF, VDI, VDR, VEGF, VEGFR-2, VEGFR-1, VEGFR-2/FLK-1, VHL, VIM, VMD2, VMD1, VMGLOM, VNEZ, VNF, VP, VRNI, VWF, VWS, WAS, WBS2, WFS2, WFS1, WHCR, WHN, WISP3, WMS, WRN, WS2A, WS2B, WSN, WSS, WT2, WT3, WT1, WTS, WWS, XAGE, XDH, XIC, XIST, XK, XM, XPA, XPC, XRCC9, XS, ZAP70, ZFHX1B, ZFX, ZFY, ZIC2, ZIC3, ZNF145, ZNF261, ZNF35, ZNF41, ZNF6, ZNF198, and ZWS1, or an isoform, homolog, fragment, variant or derivative of any of these proteins.

[0185] Further therapeutic (poly-)peptides or proteins may be selected from apoptotic factors or apoptosis related proteins including AIF, Apaf e.g. Apaf-1, Apaf-2, Apaf-3, oder APO-2 (L), APO-3 (L), Apopain, Bad, Bak, Bax, Bcl-2, Bcl-x[L], Bcl-x[s], bik, CAD, Calpain, Caspase e.g. Caspase-1, Caspase-2, Caspase-3, Caspase-4, Caspase-5, Caspase-6, Caspase-7, Caspase-8, Caspase-9, Caspase-10, Caspase-1 1, ced-3, ced-9, c-Jun, c-Myc, crm A, cytochrom C, CdR1, DcR1, DD, DED, DISC, DNA-PKc[S], DR3, DR4, DR5, FADD/MORT-1, FAK, Fas (Fas-ligand CD95/fas (receptor)), FLICE/MACH, FLIP, fodrin, fos, G-Actin, Gas-2, gelsolin, granzyme A/B, ICAD, ICE, JNK, lamin A/B, MAP, MCL-1, Mdm-2, MEKK-1, MORT-1, NEDD, NF-[kappa]B, NuMa, p53, PAK-2, PARP, perforin, PITSLRE, PKCdelta, pRb, presenilin, prICE, RAIDD, Ras, RIP, sphingomyelinase, thymidinkinase from herpes simplex, TRADD, TRAF2, TRAIL-R1, TRAIL-R2, TRAIL-R3, transglutaminase, et cetera, or an isoform, homolog, fragment, variant or derivative of any of these proteins.

[0186] An “adjuvant” (poly-)peptide or protein generally means any (poly-)peptide or protein capable of modifying the effect of other agents, typically other active agents that are administered simultaneously. Preferably, “adjuvant or immunostimulating” (poly-)peptides or proteins are capable potentiating or modulating a desired immune response to a (preferably co-administered) antigen. In particular, an “adjuvant or immuno-stimulating” (poly-)peptide or protein may act to accelerate, prolong, or enhance immune responses when used in combination with specific antigens. To that end, “adjuvant or immuno-stimulating” (poly-)peptides or proteins may support administration and delivery of co-administered antigens, enhance the (antigen-specific) immunostimulatory properties of co-administered antigens, and/or initiate or increase an immune response of the innate immune system, i.e. a non-specific immune response. Exemplary “adjuvant or immunostimulating (poly-)peptides or proteins” envisaged in the present invention include mammalian proteins, in particular human adjuvant proteins, which typically comprise any human protein or peptide, which is capable of eliciting an innate immune response (in a mammal), e.g. as a reaction of the binding of an exogenous TLR ligand to a TLR. More preferably, human adjuvant proteins are selected from the group consisting of proteins which are components and ligands of the signalling networks of the pattern recognition receptors including TLR, NLR and RLH, including TLR1, TLR2, TLR3, TLR4, TLR5, TLR6, TLR7, TLR8, TLR9, TLR10, TLR11; NOD1, NOD2, NOD3, NOD4, NOD5, NALP1, NALP2, NALP3, NALP4, NALP5, NALP6, NALP6, NALP7, NALP7, NALP8, NALP9, NALP10, NALP11, NALP12, NALP13, NALP14, l IPAF, NAIP, CIITA, RIG-I, MDA5 and LGP2, the signal transducers of TLR signaling including adaptor proteins including e.g. Trif and Cardif; components of the Small-GTPases signalling (RhoA, Ras, Rac1, Cdc42, Rab etc.), components of the PIP signalling (PI3K, Src-Kinases, etc.), components of the MyD88-dependent signalling (MyD88, IRAK1, IRAK2, IRAK4, TIRAP, TRAF6 etc.), components of the MyD88-independent signalling (TICAM1, TICAM2, TRAF6, TBK1, IRF3, TAK1, IRAK1 etc.); the activated kinases including e.g. Akt, MEKK1, MKK1, MKK3, MKK4, MKK6, MKK7, ERK1, ERK2, GSK3, PKC kinases, PKD kinases, GSK3 kinases, JNK, p38MAPK, TAK1, IKK, and TAK1; the activated transcription factors including e.g. NF-kappaB, c-Fos, c-Jun, c-Myc, CREB, AP-1, Elk-1, ATF2, IRF-3, IRF-7, or an isoform, homolog, fragment, variant or derivative of any of these proteins.

[0187] Adjuvant (preferably mammalian) (poly-)peptides or proteins or proteins may further be selected from the group consisting of heat shock proteins, such as HSP10, HSP60, HSP65, HSP70, HSP75 and HSP90, gp96, Fibrinogen, TypIII repeat extra domain A of fibronectin; or components of the complement system including C1q, MBL, C1r, C1s, C2b, Bb, D, MASP-1, MASP-2, C4b, C3b, C5a, C3a, C4a, C5b, C6, C7, C8, C9, CR1, CR2, CR3, CR4, C1qR, C1INH, C4 bp, MCP, DAF, H, I, P and CD59, or induced target genes including e.g. Beta-Defensin, cell surface proteins; or human adjuvant proteins including trif, flt-3 ligand, Gp96 or fibronectin, etc., or an isoform, homolog, fragment, variant or derivative of any of these proteins.

[0188] Adjuvant (preferably mammalian) (poly-)peptides or proteins or proteins may further be selected from the group consisting of cytokines which induce or enhance an innate immune response, including IL-1 alpha, IL1 beta, IL-2, IL-6, IL-7, IL-8, IL-9, IL-12, IL-13, IL-15, IL-16, IL-17, IL-18, IL-21, IL-23, TNFalpha, IFNalpha, IFNbeta, IFNgamma, GM-CSF, G-CSF, M-CSF; chemokines including IL-8, IP-10, MCP-1, MIP-1alpha, RANTES, Eotaxin, CCL21; cytokines which are released from macrophages, including IL-1, IL-6, IL-8, IL-12 and TNF-alpha; IL-1R1 and IL-1 alpha, or an isoform, homolog, fragment, variant or derivative of any of these proteins.

[0189] The term “antibody” (Ab) as used herein includes monoclonal antibodies, polyclonal antibodies, mono- and multispecific antibodies (e.g., bispecific antibodies), and antibody fragments, variants and derivatives so long as they exhibit the desired biological function, which is typically the capability of specifically binding to a target. The term “specifically binding” as used herein means that the antibody binds more readily to its intended target than to a different, non-specific target. In other words, the antibody “specifically binds” or exhibits “binding specificity” to its target if it preferentially binds or recognizes the target even in the presence of non-targets as measurable by a quantifiable assay (such as radioactive ligand binding Assays, ELISA, fluorescence based techniques (e.g. Fluorescence Polarization (FP), Fluorescence Resonance Energy Transfer (FRET)), or surface plasmon resonance). An antibody that “specifically binds” to its target may or may not exhibit cross-reactivity to (homologous) targets derived from different species.

[0190] The basic, naturally occurring antibody is a heterotetrameric glycoprotein composed of two identical light (L) chains and two identical heavy (H) chains. Some antibodies may contain additional polypeptide chains, such as the J chain in IgM and IgA antibodies. Each L chain is linked to an H chain by one covalent disulfide bond, while the two H chains are linked to each other by one or more disulfide bonds depending on the H chain isotype. Each H and L chain also comprises intrachain disulfide bridges. Each H chain comprises an N-terminal variable domain (V_{H}), followed by three constant domains (C_{H}) for each of the α and γ chains and four C_{H} domains for μ and ε isotypes. Each L chain has at the N-terminus, a variable domain (V_{L}) followed by a constant domain at its other end. The V_{L} is aligned with the V_{H} and the C_{L} is aligned with the first constant domain of the heavy chain (C_{H}1). Particular amino acid residues are believed to form an interface between the light chain and heavy chain variable domains.

[0191] The L chain from any vertebrate species can be assigned to one of two clearly distinct types, called kappa and lambda, based on the amino acid sequences of their constant domains. Depending on the amino acid sequence of the constant domain of their heavy chains (C_{H}), immunoglobulins can be assigned to different classes or isotypes. There are five classes of immunoglobulins: IgA, IgD, IgE, IgG and IgM, having heavy chains designated α, β, ε, γ and μ, respectively. The γ and μ classes are further divided into subclasses on the basis of relatively minor differences in the CH sequence and function, e.g., humans express the following subclasses: IgG1, IgG2, IgG3, IgG4, IgA1 and IgA2.

[0192] The pairing of a V_{H} and V_{L} together forms a single antigen-binding site. The term “variable” refers to the fact that certain segments of the variable domains differ extensively in sequence among antibodies. The V domain mediates antigen binding and defines the specificity of a particular antibody for its particular antigen. However, the variability is not evenly distributed across the entire span of the variable domains. Instead, the V regions consist of relatively invariant stretches called framework regions (FRs) of about 15-30 amino acid residues separated by shorter regions of extreme variability called “hypervariable regions” also called “complementarity determining regions” (CDRs) that are each approximately 9-12 amino acid residues in length. The variable domains of native heavy and light chains each comprise four FRs, largely adopting a β-sheet configuration, connected by three hypervariable regions, which form loops connecting, and in some cases forming part of, the β-sheet structure. The hypervariable regions in each chain are held together in close proximity by the FRs and, with the hypervariable regions from the other chain, contribute to the formation of the antigen binding site of antibodies. The constant domains are not involved directly in binding an antibody to an antigen, but exhibit various effector functions, such as participation of the antibody dependent cellular cytotoxicity (ADCC). The term “hypervariable region” (also known as “complementarity determining regions” or CDRs) when used herein refers to the amino acid residues of an antibody which are (usually three or four short regions of extreme sequence variability) within the V-region domain of an immunoglobulin which form the antigen-binding site and are the main determinants of antigen binding specificity. CDR residues may be identified based on cross-species sequence variability or crystallographic studies of antigen-antibody complexes.

[0193] The term “antibody” as used herein thus preferably refers to immunoglobulin molecules, or variants, fragments or derivatives thereof, which are capable of specifically binding to a target epitope via at least one complementarity determining region. The term includes mono-, and polyclonal antibodies, mono-, bi- and multispecific antibodies, antibodies of any isotype, including IgM, IgD, IgG, IgA and IgE antibodies, and antibodies obtained by any means, including naturally occurring antibodies, antibodies generated by immunization in a host organism, antibodies which were isolated and identified from naturally occurring antibodies or antibodies generated by immunization in a host organism and recombinantly produced by biomolecular methods known in the art, as well as chimeric antibodies, human antibodies, humanized antibodies, intrabodies, i.e. antibodies expressed in cells and optionally localized in specific cell compartments, as well as variants, fragments and derivatives of any of these antibodies.

[0194] The term “monoclonal antibody” (mab) as used herein refers to an antibody obtained from a population of substantially homogeneous antibodies, i.e., the individual antibodies comprising the population are identical except for possible naturally-occurring mutations that may be present in minor amounts. Monoclonal antibodies are highly specific, being directed against a single antigenic site. Furthermore, in contrast to “polyclonal” antibody preparations which include different antibodies directed against different epitopes, each monoclonal antibody is directed against a single epitope on the antigen. In addition to their specificity, the monoclonal antibodies are advantageous in that they may be synthesized uncontaminated by other antibodies. The adjective “monoclonal” is not to be construed as requiring production of the antibody by any particular method. For example, the monoclonal antibodies useful in the present invention may be prepared by the hybridoma methodology first described by Kohler et al., Nature 256: 495 (1975), or they may be made using recombinant DNA methods in bacterial or eukaryotic animal or plant cells (see, e.g., U.S. Pat. No. 4,816,567). The “monoclonal antibodies” may also be isolated from phage antibody libraries using the techniques described in Clackson et al., Nature 352: 624-628 (1991) and Marks et al., J. Mol. Biol. 222: 581-597 (1991), for example.

[0195] Monoclonal antibodies include “chimeric” antibodies in which a portion of the heavy and/or light chain is identical with or homologous to corresponding sequences in antibodies derived from a particular species or belonging to a particular antibody class or subclass, while the remainder of the chain(s) is identical with or homologous to corresponding sequences in antibodies derived from another species or belonging to another antibody class or subclass. Chimeric antibodies include, e.g., “humanized” antibodies comprising variable domain antigen-binding sequences (partly or fully) derived from a non-human animal, e.g. a mouse or a non-human primate (e.g., Old World Monkey, Ape, etc.), and human constant region sequences, which are preferably capable of effectively mediating Fc effector functions, and/or exhibit reduced immunogenicity when introduced into the human body. “Humanized” antibodies may be prepared by creating a “chimeric” antibody (non-human Fab grafted onto human Fc) as an initial step and selective mutation of the (non-CDR) amino acids in the Fab portion of the molecule. Alternatively, “humanized” antibodies can be obtain directly by grafting appropriate “donor” CDR coding segments derived from a non-human animal onto a human antibody “acceptor” scaffold, and optionally mutating (non-CDR) amino acids for optimized binding.

[0196] An “antibody variant” or “antibody mutant” refers to an antibody comprising or consisting of an amino acid sequence wherein one or more of the amino acid residues have been modified as compared to a reference or “parent” antibody. Such antibody variants may thus exhibiting, increasing order of preference, at least about 5%, 10%, 20%, 30%, 40%, 50%, 60%, preferably at least about 70%, 80%, 85%, 86%, 87%, 88%, 89%, more preferably at least about 90%, 91%, 92%, 93%, 94%, most preferably at least about 95%, 96%, 97%, 98%, or 99% sequence identity to a reference or “parent” antibody, or to its light or heavy chain. Conceivable amino acid mutations include deletions, insertions or alterations of one or more amino acid residue(s). The mutations may be located in the constant region or in the antigen binding region (e.g., hypervariable or variable region). Conservative amino acid mutations, which change an amino acid to a different amino acid with similar biochemical properties (e.g. charge, hydrophobicity and size), may be preferred.

[0197] An “antibody fragment” comprises a portion of an intact antibody (i.e. an antibody comprising an antigen-binding site as well as a C_{L} and at least the heavy chain domains, C_{H}1, C_{H}2 and C_{H}3), preferably the antigen binding and/or the variable region of the intact antibody. Examples of antibody fragments include Fab, Fab′, F(ab′)₂ and Fv fragments; diabodies; linear antibodies, single-chain antibodies, and bi- or multispecific antibodies comprising such antibody fragments.

[0198] Papain digestion of antibodies produced two identical antigen-binding fragments, called “Fab” (fragment, antigen-binding) fragments, and a residual “Fc” (fragment, crystallisable) fragment. The Fab fragment consists of an entire L chain along with the variable region domain of the H chain (V_{H}), and the first constant domain of one heavy chain (C_{H}1). Each Fab fragment is monovalent with respect to antigen binding, i.e., it has a single antigen-binding site. Pepsin treatment of an antibody yields a single large F(ab′)₂ fragment which roughly corresponds to two disulfide linked Fab fragments having different antigen-binding activity and is still capable of cross-linking antigen, and a pFc′ fragment. The F(ab′)₂ fragment can be split into two Fab′ fragments. Fab′ fragments differ from Fab fragments by having a few additional residues at the carboxy terminus of the C_{H}1 domain including one or more cysteines from the antibody hinge region. Fab′-SH is the designation herein for Fab′ in which the cysteine residue(s) of the constant domains bear a free thiol group. F(ab′)₂ antibody fragments originally were produced as pairs of Fab′ fragments which have hinge cysteines between them. Other antibody fragments and chemical fragments thereof are also known. The Fab/c or Fabc antibody fragment lacks one Fab region. Fd fragments correspond to the heavy chain portion of the Fab and contain a C-terminal constant (C_{H}1) and N-terminal variable (V_{H}) domain.

[0199] The Fc fragment comprises the carboxy-terminal portions of both H chains held together by disulphides. The effector functions of antibodies are determined by sequences in the Fc region, the region which is also recognized by Fc receptors (FcR) found on certain types of cells.

[0200] “Fv” is the minimum antibody fragment which contains a complete antigen-binding site. This fragment consists of a dimer of one heavy- and one light-chain variable region domain in tight, non-covalent association. From the folding of these two domains emanate six hypervariable loops (3 loops each from the H and L chain) that contribute the amino acid residues for antigen binding and confer antigen binding specificity to the antibody. However, even a single variable domain (or half of an Fv comprising only three CDRs specific for an antigen) has the ability to recognize and bind antigen, although at a lower affinity than the entire binding site.

[0201] “Single-chain Fv” also abbreviated as “sFv” or “scFv” are antibody fragments that comprise the VH and VL antibody domains connected into a single polypeptide chain. Preferably, the sFv polypeptide further comprises a polypeptide linker between the VH and VL domains which enables the sFv to form the desired structure for antigen binding.

[0202] The term “diabodies” (also referred to as divalent (or bivalent) single-chain variable fragments, “di-scFvs”, “bi-scFvs”) refers to antibody fragments prepared by linking two scFv fragments (see preceding paragraph), typically with short linkers (about 5-10) residues) between the V_{H} and V_{L} domains such that inter-chain but not intra-chain pairing of the V domains is achieved. Another possibility is to construct a single peptide chain with two V_{H} and two V_{L} regions (“tandem scFv). The resulting bivalent fragments, have two antigen-binding sites. Likewise, trivalent scFv trimers (also referred to as “triabodies” or “tribodies”) and tetravalent scFv tetramers (“tetrabodies”) can be produced. Di- or multivalent antibodies or antibody fragments may be monospecific, i.e. each antigen binding site may be directed against the same target. Such monospecific di- or multivalent antibodies or antibody fragments preferably exhibit high binding affinities. Alternatively, the antigen binding sites of di- or multivalent antibodies or antibody fragments may be directed against different targets, forming bi- or multispecific antibodies or antibody fragments.

[0203] “Bi- or multispecific antibodies or antibody fragments” comprise more than one specific antigen-binding region, each capable of specifically binding to a different target. “Bispecific antibodies” are typically heterodimers of two “crossover” scFv fragments in which the V_{H} and V_{L} domains of the two antibodies are present on different polypeptide chains. Bi- or multispecific antibodies may act as adaptor molecules between an effector and a respective target, thereby recruiting effectors (e.g. toxins, drugs, and cytokines or effector cells such as CTL, NK cells, macrophages, and granulocytes) to an antigen of interest, typically expressed by a target cell, such as a cancer cell. Thereby, “bi- or multispecific antibodies” preferably bring the effector molecules or cells and the desired target into close proximity and/or mediate an interaction between effector and target. Bispecific tandem di-scFvs, known as bi-specific T-cell engagers (BiTE antibody constructs) are one example of bivalent and bispecific antibodies in the context of the present invention.

[0204] The structure and properties of antibodies is well-known in the art and described, inter alia, in Janeway's Immunobiology, 9^{th} ed. (rev.), Kenneth Murphy and Casey Weaver (eds), Taylor & Francis Ltd. 2008. The term “immunoglobulin” (Ig) is used interchangeably with “antibody” herein. Exemplary antibodies may be selected from the group consisting of AAB-003; Abagovomab; Abciximab; Abituzumab; Abrilumab; Actoxumab; Adalimumab; Aducanumab; Afasevikumab; Aflibercept; Afutuzuab; Afutuzumab; Alacizumab_pegol; Alemtuzumab; Alirocumab; ALX-0061; Amatuximab; Anetumab_ravtansine; Anifrolumab; Anrukinzumab; Apolizumab; Apomab; Aquaporumab; Arcitumomab_99tc; Ascrinvacumab; Aselizuab; Atezolizumab; Atinumab; Atlizuab; Aurograb; Avelumab; Bapineuzumab; Basiliximab; Bavituximab; Begelomab; Benralizumab; Betalutin; Bevacituzuab; Bevacizumab_154-aspartic_acid; Bevacizumab_154-substitution; Bevacizumab_180-serine; Bevacizumab_180-substitution; Bevacizumab_beta; Bevacizumab; Bevacizumab-rhuMAb-VEGF; Bezlotoxumab; Bimagrumab; Bimekizumab; Bleselumab; Blinatumomab; Blinatumumab; Blontuvetmab; Blosozumab; Bococizumab; Brentuximab_vedotin; Briakinumab; Brodalumab; Brolucizumab; Brontictuzumab; BTT-1023; Burosumab; Canakinumab; Cantuzumab; Cantuzumab_mertansine; Cantuzumab_ravtansine; Caplacizumab; Carlumab; Cergutuzumab_amunaleukin; Certolizumab_pegol; Cetuximab; Citatuzumab_bogatox; Cixutumumab; Clazakizumab; Clivatuzumab_tetraxetan; Codrituzumab; Coltuximab_ravtansine; Conatumumab_CV; Conatumumab; Concizumab; Crenezumab; Crotedumab; Dacetuzumab; Dacliximab; Daclizumab; Dalotuzumab; Dapirolizumab_pegol; Daratumumab; Dectrekumab; Demcizumab; Denintuzumab_mafodotin; Denosumab; Depatuxizumab; Depatuxizumab_mafodotin; Dinutuximab_beta; Dinutuximab; Diridavumab; Domagrozumab; Drozituab; Drozitumab; Duligotumab; Duligotuzumab; Dupilumab; Durvalumab; Dusigitumab; Ecromeximab; Eculizumab; Efalizumab; Efungumab; Eldelumab; Elgemtumab; Elotuzumab; Emactuzumab; Emibetuzumab; Emicizumab; Enavatuzumab; Enfortumab; Enfortumab_vedotin; Enoblituzumab; Enokizumab; Enoticumab; Ensituximab; Entolimod; Epratuzumab; Eptacog_beta; Erlizuab; Etaracizumab; Etrolizuab; Etrolizumab; Evinacumab; Evolocumab; Exbivirumab; Farletuzumab; Fasinumab; Fezakinumab; FG-3019; Fibatuzumab; Ficlatuzumab; Figitumumab; Firivumab; Flanvotumab; Fletikumab; Fontolizumab; Foralumab; Foravirumab; Fresolimumab; Fulranumab; Futuximab; Galcanezumab; Galiximab; Ganitumab; Gantenerumab; Gemtuzumab; Gemtuzumab_ozogamicin; Gevokizumab; Girentuximab; Glembatumumab; Goilixiab; Guselkumab; HuMab-001; HuMab-005; HuMab-006; HuMab-019; HuMab-021; HuMab-025; HuMab-027; HuMab-032; HuMab-033; HuMab-035; HuMab-036; HuMab-041; HuMab-044; HuMab-049; HuMab-050; HuMab-054; HuMab-055; HuMab-059; HuMab-060; HuMab-067; HuMab-072; HuMab-084; HuMab-091; HuMab-093; HuMab-098; HuMab-100; HuMab-106; HuMab_10F8; HuMab-111; HuMab-123; HuMab-124; HuMab-125; HuMab-127; HuMab-129; HuMab-132; HuMab-143; HuMab-150; HuMab-152; HuMab-153; HuMab-159; HuMab-160; HuMab-162; HuMab-163; HuMab-166; HuMab-167; HuMab-169; HuMab-7D8; huMAb-anti-MSP10.1; huMAb-anti-MSP10.2; HUMAB-Clone_18; HUMAB-Clone_22; HuMab-L612; HuMab_LC5002-002; HuMab_LC5002-003; HuMab_LC5002-005; HuMab_LC5002-007; HuMab_LC5002-018; Ibalizumab; Ibritumomab_tiuxetan; Icrucumab; Idarucizumab; Igatuzuab; IGF-IR_HUMAB-1A; IGF-IR_HUMAB-23; IGF-IR_HUMAB-8; ImAb1; Imalumab; Imgatuzumab; Inclacumab; Indatuximab_ravtansine; Indusatumab_vedotin; Inebilizumab; Insulin_peglispro; Interferon_beta-1b; Intetumumab; Iodine_(124I)_Girentuximab; Iodine_(131I)_Derlotuxiab_biotin; Iodine_(131I)_Derlotuximab_biotin; Ipilimumab; Iratumumab; Isatuximab; Itolizumab; Ixekizumab; Labetuzumab_govitecan; Lambrolizumab; Lampalizumab; Lanadelumab; Landogrozumab; Laprituximab_emtansine; Lealesoab; Lebrikizumab; Lenercept_chainl; Lenzilumab; Lerdelimumab; Lexatumumab; Libivirumab; Lifastuzumab; Lifastuzumab_vedotin; Ligelizumab; Lilotomab; Lintuzumab; Lirilumab; Lodelcizumab; Lokivetmab; Lorvotuzumab_mertansine; Lpathomab; Lucatumumab; Lulizumab_pegol; Lumiliximab; Lumretuzumab; Lutetium_(177Lu)_lilotomab_satetraxetan; Margetuximab; Marzeptacog_alfa; Matuzumab; Mavrilimumab; MDX-1303; Mepolizumab; Metelimumab; Milatuzumab; Mirvetuximab; Modotuximab; Mogamulizumab; Monalizumab; Motavizumab; Moxetumomab_pasudotox; Muromonab-CD3; Namilumab; Naptumomab_estafenatox; Narnatumab; Natalizumab; Navicixizumab; Navivumab; Ndimab-varB; Necitumumab; Neliximab; Nemolizumab; Nesvacumab; Neuradiab; Nimotuzumab; Nivolumab; Obiltoxaximab; Obinutuzumab; Ocaratuzumab; Ocrelizumab; Ofatumumab; Olaratumab; Olizuab; Olokizumab; Omalizumab; Onartuzumab; Ontuxizumab; Opicinumab; Oportuzumab_monatox; Oreptacog_alfa; Orticumab; Otelixizumab; Otlertuzumab; Oxelumab; Ozanezumab; Ozoralizumab; Palivizumab; Pamrevlumab; Panitumumab; Pankoab; PankoMab; Panobacumab; Parsatuzumab; Pascolizumab; Pasotuxizumab; Pateclizumab; Patritumab; Pembrolizumab; Perakizumab; Pertuzuab; Pertuzumab; Pexelizumab_h5g1.1-scFv; Pexelizumab; PF-05082566; PF-05082568; Pidilizumab; Pinatuzumab_vedotin; Placulumab; Plozalizumab; Pogalizumab; Polatuzumab_vedotin; Ponezumab; Pritoxaximab; Pritumumab; Quilizumab; Racotumomab; Radretumab; Rafivirumab; Ralpancizumab; Ramucirumab; Ranibiziuab; Ranibizumab; Refanezumab; REGN2810; rhuMab_HER2(9CI); rhuMab_HER2; rhuMAb-VEGF; Rilotumumab; Rinucumab; Risankizumab; Rituximab; Rivabazumab_pegol; Robatumumab; Roledumab; Romosozumab; Rontalizuab; Rontalizumab; Rovalpituzumab_tesirine; Rovelizumab; Ruplizumab; Sacituzumab_govitecan; Samalizumab; Sarilumab; Satumomab_pendetide; Secukinumab; Seribantumab; Setoxaximab; Sifalimumab; Siltuximab; Simtuzumab; Sirukumab; Sofituzumab_vedotin; Solanezumab; Solitomab; Sonepcizumab; Stamulumab; Suptavumab; Suvizumab; Tabalumab; Tacatuzuab; Tadocizumab; Talizumab; Tamtuvetmab; Tanezumab; Tarextumab; Tefibazumab; Tenatumomab; Teneliximab; Teplizumab; Teprotumumab; Tesidolumab; Tezepelumab; ThioMAb-chMA79b-HC(A118C); ThioMab-hu10A8.v1-HC(A118C); ThioMab-hu10A8.v1-HC(V205C); ThioMab-hu10A8.v1-LC(A118C); ThioMab-hu10A8.v1-LC(V205C); ThioMAb-huMA79b.v17-HC(A118C); ThioMAb-huMA79b.v18-HC(A118C); ThioMAb-huMA79b.v28-HC(A118C); ThioMAb-huMA79b.v28-LC(V205C); Ticiliuab; Tigatuzumab; Tildrakizumab; Tisotumab_vedotin; Tocilizumab; Tosatoxumab; Tositumomab; Tovetumab; Tralokinumab; Trastuzuab; Trastuzumab_emtansine; Trastuzumab; TRC-105; Tregalizumab; Tremelimumab; Trevogrumab; Tucotuzumab_celmoleukin; Ublituximab; Ulocuplumab; Urelumab; Urtoxazumab; Ustekinumab; Vadastuximab_talirine; Vandortuzumab_vedotin; Vantictumab; Vanucizumab; Varlilumab; Vatelizumab; Vedolizumab; Veltuzumab; Vesencumab; Visilizumab; Volociximab; Vorsetuzumab; Vorsetuzumab_mafodotin; Yttrium_(90Y)_clivatuzumab_tetraxetan; Yttrium_Y_90_epratuzumab_tetraxetan; Yttrium_Y_90_epratuzumab; Zalutumumab; Zanolimumab; Zatuximab; Andecaliximab; Aprutumab; Azintuxizumab; Brazikumab; Cabiralizumab; Camrelizumab; Cosfroviximab; Crizanlizumab; Dezamizumab; Duvortuxizumab; Elezanumab; Emapalumab; Eptinezumab; Erenumab; Fremanezumab; Frunevetmab; Gatipotuzumab; Gedivumab; Gemetuzumab; Gilvetmab; Ifabotuzumab; Lacnotuzumab; Larcaviximab; Lendalizumab; Lesofavumab; Letolizumab; Losatuxizumab; Lupartumab; Lutikizumab; Oleclumab; Porgaviximab; Prezalumab; Ranevetmab; Remtolumab; Rosmantuzumab; Rozanolixizumab; Sapelizumab; Selicrelumab; Suvratoxumab; Tavolixizumab; Telisotuzumab; Telisotuzumab_vedotin; Timigutuzumab; Timolumab; Tomuzotuximab; Trastuzumab_duocarmazine; Varisacumab; Vunakizumab; Xentuzumab; anti-rabies_SO57; anti-rabies_SOJB; anti-rabies_SOJA; anti-rabies; anti-RSV_5ITB; anti-alpha-toxin_4U6V; anti-IsdB_5D1Q; anti-IsdB_5D1X; anti-IsdB_5D1Z; anti-HIV_b12; anti-HIV_2G12; anti-HIV_4E10; anti-HIV_VRC01; anti-HIV_PG9; anti-HIV_VRC07; anti-HIV_3BNC117; anti-HIV_10-1074; anti-HIV_PGT121; anti-HIV_PGDM1400; anti-HIV_N6; anti-HIV_10E8; anti-HIV_12A12; anti-HIV_12A21; anti-HIV_35022; anti-HIV_3BC176; anti-HIV_3BNC55; anti-HIV_3BNC60; anti-HIV_447-52D; anti-HIV_5H/I1-BMV-D5; anti-HIV_8ANC195; anti-HIV_cap256-176-723043/600049/531926/504134; anti-HIV_CAP256-VRC26.01/VRC26.02/VRC26.03/VRC26.04/VRC26.05/VRC26.06/VRC26.07/VRC26.08/VRC26.09/VRC26.10/VRC26.11/VRC26.12/VRC26.I1/VRC26.I2/VRC26.UCA; anti-HIV_cap256-206-252885/249183/220956/220629/200599/186347/186226/179686/173707/173339/172689/162744/146057/139519/1363 16/116098/115862/107018/098644/098135/096276/092794/086817/086446/086180/083708/079556/078657/075802/0 69097/067758/057019/055385/053187/053139/050350/046207/043389/042555/029720/028848/027652/024075/00874 8/008530; anti-HIV_cap256-119-186229/183891/183631/182676/180772/180508/180260/180173/179839/179262/178995/178455/177993/177727/176746/176241/175215/173928/173495/172882/172429/172223/171838/171587/1695 96/169523/169462/169092/168680/166385/165943/165738/164913/164167/163558/162043/161718/161675/161053/1 59499/159114/156751/155656/154420/153954/153864/153793/153462/153124/153025/152713/151794/150980/14889 5/148848/148743/148595/148490/148470/148107/147933/147434/146106/145604/143998/143441/141307/140896/14 0090/140037/139135/137881/137643/137170/136616/136206/135565/135025/133983/133917/132663/132113/131839/130626/130191/129798/128745/128593/128152/127693/126684/126056/125765/125106/124026/121783/121208/120 945/118229/118025/117418/117250/117230/116999/116558/116484/114844/114141/111917/111862/110064/109192/108793/108127/107758/107209/107184/106827/106511/106327/105486/105197/104946/103667/103385/103267/1030 11/102072/101945/101319/100871/100838/100025/100000/098890/098715/098632/097199/096189/094581/094200/0 94158/092814/092808/092573/090815/090368/089710/088555/087962/086903/086804/085910/085772/084603/08427 6/082288/080383/079333/078618/077466/076284/074680/074081/071704/071266/069667/069591/068691/068488/06 7536/065852/065457/064501/063568/063103/061027/058232/057341/056895/056402/056034/055042/054776/054539/054112/053339/052404/051123/051077/050442/049433/047532/047489/046020/044746/044740/043790/042880/042 606/042444/040328/040164/039130/038138/037868/037102/036683/036495/035375/035165/035109/033789/033641/032113/031739/030932/030740/030197/027047/026950/026279/025355/025301/025010/024631/024467/023805/0217 36/021203/020569/019432/018827/018483/018118/017782/017669/016976/015432/015281/014957/014777/014313/0 14219/013631/012924/011793/011413/011323/011233/009038/008756/008055/006949/006685/006015/005841/00582 4/005494/004949/004422/003932/003577/002155/002017/001312/001017/000594; anti-HIV_cap256-059-241099/207529/205541/188439/187234/187047/186068/182835/176659/172956/171272/168734/155838/149799/148168/1446 85/140017/137547/131908/116006/115783/114609/113952/113878/113622/109427/109081/107590/107504/099614/0 98972/097236/091487/089812/088468/088341/086533/086043/084191/082135/079417/076027/075082/072575/07192 6/069638/069165/068956/068876/067733/067450/065694/065109/065060/064001/063270/061357/059834/059313/05 7130/050520/049839/048503/045516/044188/044105/042100/040742/040554/039660/039298/037873/037633/036817/032787/032427/029390/027877/026640/026017/024100/023966/020534/019513/012963/010396/008136/006147/005 081/005006/004451/003571/003449/002712/001573/001379/001029; anti-HIV_cap256-048-165087/158861/158280/157928/157056/156422/152863/152770/150027/148246/147428/146603/145735/145116/144077/142876/140582/1393 55/139151/137672/137506/137270/135447/131966/131008/129369/128476/128270/126220/125713/123934/122673/1 22208/121552/120643/118458/118112/116469/113917/112368/112047/112029/110957/110526/109336/108152/10779 9/107384/106530/106464/106411/106306/104496/103074/100832/100188/099645/098137/097878/097510/097313/09 6626/096483/095691/095525/094783/094356/090756/089065/084986/083355/082462/082246/080752/078409/078273/078062/077798/073853/071661/071360/070955/070061/069669/069205/068882/067764/066845/065226/063717/063 150/062431/060745/060420/060014/059747/058393/058159/057127/056251/055421/054989/054759/052573/051477/051299/050815/049884/049170/048531/048259/047313/046596/044781/042599/041276/040200/039061/038515/0382 55/038177/035513/034112/033983/032688/031092/030464/030289/030261/029362/027638/027613/026627/026239/0 25518/024854/024537/021781/021758/020988/020663/020590/019765/019254/018073/016775/016069/015867/01567 3/015156/014521/014475/013798/013271/013180/012148/011870/011530/010968/010224/009749/009623/008234/00 8149/007301/007174/007079/007033/006128/005999/005394/004226/004097/003289/002601/002129/001875/001302/001203/000383; anti-HIV_cap256-038-261791/241540/235677/234314/234273/223164/220289/220020/216853/213466/213212/213120/212592/211790/209916/207938/202245/197721/196679/196118/195382/180001/178021/1771 04/171261/169090/168705/167685/158775/157318/153058/150027/146372/141868/141616/127989/118109/112226/1 05918/104487/102308/091115/090262/083260/080981/080873/074413/073153/064227/061640/059482/054000/05055 4/044256/040944/040090/032874/025899/024581/013345/011559/009634/006730/004887/004840/002181/001902/00 0976/000384; anti-HIV_048-250757/250716/250463/248153/247532/245846/244016/243682/243588/241775/237996/237730/237253/234100/230882/229473/228238/228027/227795/227770/225298/225090/224187/223055/222711/2212 09/220629/219430/216250/216133/214886/214709/214001/213230/212574/212207/209146/208206/208194/207744/2 06501/204221/204015/201240/200455/200319/197896/193813/192098/191786/188746/185937/184849/183089/18150 9/180990/177532/177426/177389/174266/172847/172845/172363/171609/170705/168381/166619/162036/160042/15 9676/159500/159421/159333/158932/155811/155464/155392/155389/154449/153379/153171/152324/146102/145984/145371/144907/142298/142277/141934/141207/140796/139893/138820/135858/134968/134312/132253/130710/128 564/126702/124521/122740/119536/116929/116577/116046/115875/115599/113988/112989/112435/111339/111055/111027/109721/109666/109196/109051/108570/108033/107279/106271/106054/104848/104638/104567/102804/1016 76/097603/097107/096871/096668/095236/094155/093219/092976/090866/090650/089009/088654/086513/086024/0 85857/084277/084245/082487/081787/081062/079639/079126/073118/070264/069426/068564/068345/067337/06718 0/063017/061885/061671/060700/060592/060300/059141/057777/056928/056131/055864/055094/054343/054193/05 2521/049037/048720/048542/047777/046841/046202/046059/043568/042713/042440/040511/039195/036935/034478/031641/029760/027970/027337/027217/026760/024800/024313/021748/020991/020340/019993/019947/017871/015 931/015920/013898/013429/012358/011158/010720/009445/006126/005652/005532/005189/005088/004023/001580; anti-HIV_119-099719/099536/098907/098555/097828/096480/095664/095212/094773/094508/093795/093732/092903/092284/091586/091023/090334/088694/088499/088298/087488/087423/087371/087279/087146/087048/0858 02/085784/085370/085276/084885/084874/084691/083793/083163/082331/082070/081512/080816/079302/079292/0 79289/078935/078702/078593/077708/076904/075862/075465/074822/074629/074500/073911/072765/072313/07228 0/071693/071353/069711/069061/068202/068063/067980/067866/067756/066859/065821/065191/064667/063791/06 2989/062286/061416/061344/060240/060184/058035/057858/057473/057090/055754/054899/054501/051867/051814/051567/051483/050913/050187/049069/048517/048470/048303/048021/047928/047384/047145/046752/046660/046 202/045790/044670/044140/042776/042581/040905/040322/039892/039764/039188/039058/038837/038396/036918/036592/036310/035618/035569/035466/035157/035121/035046/034754/034318/033780/033632/033183/030696/0300 59/029589/029448/029220/028317/028165/027147/026743/026508/025683/025614/025548/025526/023552/023092/0 22793/022395/022334/021866/021278/021183/019376/019238/018500/018318/018218/017876/017740/017128/01704 4/016644/015878/015538/015455/014425/013582/013364/012886/012249/012161/012110/012100/011651/011479/01 1232/011175/008396/007148/007029/004707/003910/002450/001552; anti-HIV_CH01/CH02/CH03/CH04/CH103/M66.6/NIH45-46/PG16/PGT122/PGT123/PGT125/PGT126/PGT127/PGT128/PGT130/PGT131/PGT135/PGT136/PGT137/PGT141/PGT142/PGT143/PGT144/PGT145/PGT151/PGT152/VRC-CH30/VRC-CH31/VRC-CH32/VRC-CH33/VRC-CH34/VRC-PG04/VRC-PG04b/VRC-PG20/VRC02/VRC03/VRC23/5CCK/5AWN/3QEG/1NOX/3QEH/2B1H/3TNM/3UJJ/3UJI/2QSC/3MLZ/3MLX/3MLW/3MLV/3MLU/3MLT/3G01/4XCY/4YBL/4R4N/4R4B/3JUY/4KG5anti-HIV-1/V3/CD4bs/V2/C38-VRC18.02/44-VRC13.02/45; anti-HIV_059-188169/183739/182376/182199/169202/155645/151619/146503/136098/105516/095709/069468/060026/053668/052864/050968/046422/045120/039932/038595/035082/029204/025235/0151 92/007060/006953/005953/003725/002618/001522/000731/000634; anti-HIV_206-314431; anti-HIV_206-247594; anti-HIV_206-116890; anti-HIV_206-072383; anti-HIV_206-037527; anti-HIV_206-009095; anti-HIV_176-503620; anti-HIV_176-478726; anti-HIV_176-245056; anti-HIV_176-164413; anti-HIV_176-094308; anti-HIV_176-065321; anti-HIV_038-221120; anti-HIV_038-197677; anti-HIV_038-196765; anti-HIV_038-186200; anti-HIV_038-126170; anti-HIV_038-108545; anti-HIV_038-107263; anti-HIV_038-104530; anti-HIV_038-099169; anti-HIV_038-075067; anti-HIV_038-072368; anti-HIV_038-068503; anti-HIV_038-068016; anti-HIV_038-063958; anti-HIV_038-033733; anti-HIV_038-030557; anti-HIV_038-024298; anti-HIV_038-011154; anti-HIV_5CIN; anti-HIV_5CIL; anti-HIV_5CIP; anti-HIV_4JKP; anti-HIV_3TNN; anti-HIV_3BQU; anti-HIV_IgG; anti-HIV_4P9M; anti-HIV_4P9H; anti-HIV_Ig; anti-HIV; anti-influenza; anti-influenza_Apo; anti-influenza-A; and anti-OX40, or a homolog, fragment, variant or derivative of any of these antibodies.

[0205] Artificial nucleic acid molecules of the invention encoding preferred antibodies may preferably comprise a coding region comprising or consisting of a nucleic acid sequence according to any one of the SEQ ID NO:1 to 61734 or respectively Table 3, Table 4, Table 5, Table 6 or Table 9 as described in international patent application PCT/EP2017/060226, in particular a nucleic acid sequence being identical or having a sequence identity of at least 50%, 60%, 70%, 80%, 81%, 82%, 83%, 84%, 85%, 86%, 87%, 88%, 89%, 90%, 91%, 92%, 93%, 94%, 95%, 96%, 97%, 98%, or 99%, preferably at least 80%, to these sequences or a fragment or variant of any of these RNA sequences. In this context, the disclosure of PCT/EP2017/060226 is also incorporated herein by reference. The person skilled in the art knows that also other (redundant) mRNA sequences can encode the proteins as shown in the above reference, therefore the mRNA sequences are not limited thereto.

[0206] Artificial nucleic acid molecules of the invention encoding preferred therapeutic proteins may preferably comprise a coding region comprising or consisting of a nucleic acid sequence according to any one of the SEQ ID NO as shown in SEQ ID NO:1 to SEQ ID NO:345916 or respectively Table I as described in U.S. application Ser. No. 15/585,561, in particular a nucleic acid sequence being identical or having a sequence identity of at least 50%, 60%, 70%, 80%, 81%, 82%, 83%, 84%, 85%, 86%, 87%, 88%, 89%, 90%, 91%, 92%, 93%, 94%, 95%, 96%, 97%, 98%, or 99%, preferably at least 80%, to these sequences or a fragment or variant of any of these RNA sequences. In this context, the disclosure of U.S. application Ser. No. 15/585,561 is also incorporated herein by reference. The person skilled in the art knows that also other (redundant) mRNA sequences can encode the proteins as shown in the above reference, therefore the mRNA sequences are not limited thereto.

[0207] Further artificial nucleic acid molecules of the invention encoding preferred therapeutic proteins may preferably comprise a coding region comprising or consisting of a nucleic acid sequence according to any one of the SEQ ID NO as shown in SEQ ID NO:1 to SEQ ID NO:345916 or respectively Table I as described in international patent application PCT/EP2017/060692, in particular a nucleic acid sequence being identical or having a sequence identity of at least 50%, 60%, 70%, 80%, 81%, 82%, 83%, 84%, 85%, 86%, 87%, 88%, 89%, 90%, 91%, 92%, 93%, 94%, 95%, 96%, 97%, 98%, or 99%, preferably at least 80%, to these sequences or a fragment or variant of any of these RNA sequences. In this context, the disclosure of international patent application PCT/EP2017/060692 is also incorporated herein by reference. The person skilled in the art knows that also other (redundant) mRNA sequences can encode the proteins as shown in the above reference, therefore the mRNA sequences are not limited thereto.

[0208] The term “peptide hormone” refers to a class of peptides or proteins that have endocrine functions in living animals. Typically, peptide hormones exert their functions by binding to receptors on the surface of target cells and transmitting signals via intracellular second messengers. Exemplary peptide hormones include Adiponectin i.e. Acrp30; Adrenocorticotropic hormone (or corticotropin) i.e. ACTH; Amylin (or Islet Amyloid Polypeptide) i.e. IAPP; Angiotensinogen and angiotensin i.e. AGT; Anti-Müllerian hormone (or Müllerian inhibiting factor or hormone) i.e. AMH; Antidiuretic hormone (or vasopressin, arginine vasopressin) i.e. ADH; Atrial-natriuretic peptide (or atriopeptin) i.e. ANP; Brain natriuretic peptide i.e. BNP; Calcitonin i.e. CT; Cholecystokinin i.e. CCK; Corticotropin-releasing hormone i.e. CRH; Cortistatin i.e. CORT; Endothelin i.e.; Enkephalin i.e.; Erythropoietin i.e. EPO; Follicle-stimulating hormone i.e. FSH; Galanin i.e. GAL; Gastric inhibitory polypeptide i.e. GIP; Gastrin i.e. GAS; Ghrelin i.e.; Glucagon i.e. GCG; Glucagon-like peptide-1 i.e. GLP1; Gonadotropin-releasing hormone i.e. GnRH; Growth hormone i.e. GH or hGH; Growth hormone-releasing hormone i.e. GHRH; Guanylin i.e. GN; Hepcidin i.e. HAMP; Human chorionic gonadotropin i.e. hCG; Human placental lactogen i.e. HPL; Inhibin i.e.; Insulin i.e. INS; Insulin-like growth factor (or somatomedin) i.e. IGF; Leptin i.e. LEP; Lipotropin i.e. LPH; Luteinizing hormone i.e. LH; Melanocyte stimulating hormone i.e. MSH or a-MSH; Motilin i.e. MLN; Orexin i.e.; Osteocalcin i.e. OCN; Oxytocin i.e. OXT; Pancreatic polypeptide i.e. Parathyroid hormone i.e. PTH; Pituitary adenylate cyclase-activating peptide i.e. PACAP; Prolactin i.e. PRL; Prolactin releasing hormone i.e. PRH; Relaxin i.e. RLN; Renin i.e.; Secretin i.e. SCT; Somatostatin i.e. SRIF; Thrombopoietin i.e. TPO; Thyroid-stimulating hormone (or thyrotropin) i.e. TSH; Thyrotropin-releasing hormone i.e. TRH; Uroguanylin i.e. UGN; or Vasoactive intestinal peptide i.e. VIP, or an isoform, homolog, fragment, variant or derivative of any of these proteins.

[0209] The term “gene editing agent” refers to (poly-)peptides or proteins that are capable of modifying (i.e. alter, induce, increase, reduce, suppress, abolish or prevent) expression of a gene. Gene expression can be modified on several levels. Gene editing agents may typically act by (a) introducing or removing epigenetic modifications, (b) altering the sequence of genes, e.g. by introducing, deleting or changing nucleic acid residues in the nucleic acid sequence of a gene of interest (c) modifying the biological function of regulatory elements operably linked to the gene of interest (d) modifying mRNA transcription, processing, splicing, maturation or export into the cytoplasm, (e) modifying mRNA translation, (f) modifying post-translational modifications, (g) modifying protein translocation or export. In a narrower sense, the term “gene editing agent” may refer to (poly-)peptides or proteins targeting the genome of a cell to modify gene expression, preferably by exerting functions (a)-(d), more preferably (a)-(c). The term “gene editing agent” as used herein thus preferably encompasses gene editing agents that cleave or alter the targeted DNA to induce mutation (e.g., via homologous directed repair or non-homologous end-joining), but also includes gene editing agents that can reduce expression in the absence of target cleavage (e.g., gene editing agents that are fused or conjugated to expression modulators such as transcriptional repressors or epigenetic modifiers that can reduce gene expression). Particular gene editing agents include: transcriptional activators, transcriptional repressors, recombinases, nucleases, DNA-binding proteins, or combinations thereof.

[0210] The present invention also relates to artificial nucleic acids, in particular RNAs, encoding CRISPR-associated proteins, and (pharmaceutical) compositions and kit-of-parts comprising the same. Said artificial nucleic acids, in particular RNAs, (pharmaceutical) compositions and kits are inter alia envisaged for use in medicine, for instance in gene therapy, and in particular in the treatment and/or prophylaxis of diseases amenable to treatment with CRISPR-associated proteins, e.g. by gene editing, knock-in, knock-out or modulating the expression of target genes of interest.

[0211] The term “CRISPR-associated protein” refers to RNA-guided endonucleases that are part of a CRISPR (Clustered Regularly Interspaced Short Palindromic Repeats) system (and their homologs, variants, fragments or derivatives), which is used by prokaryotes to confer adaptive immunity against foreign DNA elements. CRISPR-associated proteins include, without limitation, Cas9, Cpf1 (Cas12), C2c1, C2c3, C2c2, Cas13, CasX and CasY. As used herein, the term “CRISPR-associated protein” includes wild-type proteins as well as homologs, variants, fragments and derivatives thereof. Therefore, when referring to artificial nucleic acid molecules encoding Cas9, Cpf1 (Cas12), C2c1, C2c3, and C2c2, Cas13, CasX and CasY, said artificial nucleic acid molecules may encode the respective wild-type proteins, or homologs, variants, fragments and derivatives thereof.

[0212] Preferably, the at least one 5′UTR element and the at least one 3′UTR element act synergistically to increase the expression of the at least one coding sequence operably linked to said UTRs. It is envisaged herein to utilize the recited 5′-UTRs and 3′-UTRs in any useful combination. Further particularly preferred embodiments of the invention comprise the combination of the CDS of choice, i.e. a CDS selected from the group consisting of Cas9, Cpf1, CasX, CasY, and Cas13 with an UTR-combination selected from the group of HSD17B4/Gnas.1; Slc7a3.1/Gnas.1; ATP5A1/CASP.1; Ndufa4.1/PSMB3.1; HSD17B4/PSMB3.1; RPL32var/albumin7; 32L4/albumin7; HSD17B4/CASP1.1; Slc7a3.1/CASP1.1; Slc7a3.1/PSMB3.1; Nosip.1/PSMB3.1; Ndufa4.1/RPS9.1; HSD17B4/RPS9.1; ATP5A1/Gnas.1; Ndufa4.1/COX6B1.1; Ndufa4.1/Gnas.1; Ndufa4.1/Ndufa1.1; Nosip.1/Ndufa1.1; Rpl31.1/Gnas.1; TUBB4B.1/RPS9.1; and Ubqln2.1/RPS9.1.

[0213] The term “immune checkpoint inhibitor” refers to any (poly-)peptide or protein capable of inhibiting (i.e. interfering with, blocking, neutralizing, reducing, suppressing, abolishing, preventing) the biological activity of an immune checkpoint protein. Immune checkpoint proteins typically regulate T-cell activation or function and are well known in the art. Immune checkpoint proteins include, without limitation, CTLA-4, PD-1, VISTA, B7-H2, B7-H3, PD-L1 (B7-H1, CD274), B7-H4, B7-H6, 2B4, ICOS, HVEM, PD-L2 (B7-DC, CD273), CD2, CD27, CD28, CD30, CD40, CD70, CD80, CD86, CD137, CD160, CD226, CD276, CD160, gp49B, PIR-B, KIR family receptors, TIM-1, TIM-3, TIM-4, LAG-3, BTLA, SIRPalpha (CD47), CD48, 2B4 (CD244), B7.1, B7.2, ILT-2, ILT-4, TIGIT, A2aR, DR3, IDOL, IDO2, LAIR-2, LIGHT, MARCO (macrophage receptor with collagenous structure), PS (phosphatidylserine), OX-40, SLAM, TIGHT, VISTA, and/or VTCN1. Exemplary agents useful for inhibiting immune checkpoint proteins include antibodies (and antibody fragments, variants or derivatives), peptides, natural ligands (and ligand fragments, variants or derivatives), fusion proteins, that can either directly bind to (and thereby inactivate or inhibit) or indirectly inactivate or inhibit immune checkpoint proteins, e.g. by binding to, inactivating and/or inhibiting their receptors or downstream signalling molecules to block the interaction between one or more immune checkpoint proteins and their natural receptor(s) and/or to prevent inhibitory signalling mediated by binding of said immune checkpoint proteins and their natural receptor(s). Exemplary immune checkpoint inhibitors include A2AR; B7-H3 i.e. cD276; B7-H4 i.e. VTCN1; BTLA; CTLA-4; IDO i.e. Indoleamine 2,3-dioxygenase; KIR i.e. Killer-cell Immunoglobulin-like Receptor; LAG3 i.e. Lymphocyte Activation Gene-3; PD-1 i.e. Programmed Death 1 (PD-1) receptor; PD-L1, TIM-3 i.e. T-cell Immunoglobulin domain and Mucin domain 3; VISTA (protein) i.e. V-domain Ig suppressor of T cell activation; GITR, i.e. Glucocorticoid-Induced TNFR family Related gene; stimulatory checkpoint molecules i.e. CD27, CD40, CD122, OX40, GITR and CD137 or stimulatory checkpoint molecules belonging to the B7-CD28 superfamily, i.e. CD28 and ICOS, or an isoform, homolog, fragment, variant or derivative of any of these proteins.

[0214] The term “T cell receptor” or “TCR” refers to a T-cell specific protein receptor that is composed of a heterodimer of variable, disulphide-linked alpha (α) and beta ( ) chains, or of gamma and delta (γ/δ) chains, optionally forming a complex with domains for additional (co-)stimulatory signalling, such as the invariant CD3-zeta (ζ) chains and/or FcR, CD27, CD28, 4-1BB (CD137), DAP10, and/or OX40. The term “T cell receptor” includes (engineered) variants, fragments and derivatives of such naturally occurring TCRs, including chimeric antigen receptors (CARs). The term “chimeric antigen receptor (CAR)” generally refers to engineered fusion proteins comprising binding domains fused to an intracellular signalling domain capable of activating T cells. Typically, CARs are chimeric polypeptide constructs comprising at least an extracellular antigen binding domain, a transmembrane domain and a cytoplasmic signalling domain (also referred to herein as “an intracellular signalling domain”) comprising a functional signalling domain derived from a (co-)stimulatory molecule, such as the CD3-zeta chain, FcR, CD27, CD28, 4-1BB (CD137), DAP10, and/or OX40. The extracellular antigen-binding domain may typically be derived from a monoclonal antibody or a fragment, variant or derivative thereof. In particular aspects, CARs comprise fusions of single-chain variable fragments (scFv) derived from monoclonal antibodies, fused to CD3-zeta transmembrane and intracellular endodomain.

[0215] Artificial nucleic acid molecules of the invention encoding preferred sequences for the treatment of tumor or cancer diseases may preferably comprise a coding region comprising or consisting of a nucleic acid sequence according to any one of the SEQ ID NO:1 to 10071, preferably SEQ ID NO:1, 3, 5, 6, 389, or 399, or respectively Tables 1 to 12 or Tables 14-17 as described in international patent application WO2016170176A1, in particular a nucleic acid sequence being identical or having a sequence identity of at least 50%, 60%, 70%, 80%, 81%, 82%, 83%, 84%, 85%, 86%, 87%, 88%, 89%, 90%, 91%, 92%, 93%, 94%, 95%, 96%, 97%, 98%, or 99%, preferably at least 80%, to these sequences or a fragment or variant of any of these RNA sequences. In this context, the disclosure of WO2016170176A1 is also incorporated herein by reference. The person skilled in the art knows that also other (redundant) mRNA sequences can encode the proteins as shown in the above reference, therefore the mRNA sequences are not limited thereto.

[0216] Further artificial nucleic acid molecules of the invention encoding preferred sequences for the treatment of tumor or cancer diseases may preferably comprise a coding region comprising or consisting of a nucleic acid sequence according to any one of the SEQ ID NO SEQ ID NO as shown in international patent applications WO2009046974, WO2015024666, WO2009046739, WO2015024664, WO2003051401, WO2012089338, WO2013120627, WO2014127917, WO2016170176, or WO2015135558, in particular a nucleic acid sequence being identical or having a sequence identity of at least 50%, 60%, 70%, 80%, 81%, 82%, 83%, 84%, 85%, 86%, 87%, 88%, 89%, 90%, 91%, 92%, 93%, 94%, 95%, 96%, 97%, 98%, or 99%, preferably at least 80%, to these sequences or a fragment or variant of any of these RNA sequences. In this context, the disclosure of WO2009046974, WO2015024666, WO2009046739, WO2015024664, WO2003051401, WO2012089338, WO2013120627, WO2014127917, WO2016170176, or WO2015135558 is also incorporated herein by reference. The person skilled in the art knows that also other (redundant) mRNA sequences can encode the proteins as shown in the above reference, therefore the mRNA sequences are not limited thereto.

[0217] The term “enzyme” is well-known in the art and refers to (poly-)peptide and protein catalysts of chemical reactions. Enzymes include whole intact enzyme or fragments, variants or derivatives thereof. Exemplary enzymes include oxidoreductases, transferases, hydrolases, lyases, isomerases, and ligases.

[0218] Fragments, variants and derivatives of the aforementioned therapeutic proteins are also envisaged as (poly-)peptides or proteins of interest, provided that they are preferably functional and thus capable of mediating the desired biological effect or function.

### Antigenic (Poly-)Peptides or Proteins

[0219] The at least one coding region of the artificial nucleic acid molecule of the invention may encode at least one “antigenic (poly-)peptide or protein”. The term “antigenic (poly-)peptide or protein” or, shortly, “antigen” generally refers to any (poly-)peptide or protein capable, under appropriate conditions, of interacting with/being recognized by components of the immune system (such as antibodies or immune cells via their antigen receptors, e.g. B cell receptors (BCRs) or T cell receptors (TCRs)), and preferably capable of eliciting an (adaptive) immune response. The term “components of the immune system” preferably refers to immune cells, immune cell receptors and antibodies of the adaptive immune system. The “antigenic peptide or protein” preferably interacts with/is recognized by the components of the immune system via its “epitope(s)” or “antigenic determinant(s)”.

[0220] The term “epitope” or “antigenic determinant” refers to a part or fragment of an antigenic peptide or protein that recognized by the immune system. Said fragment may typically comprise from about 5 to about 20 or even more amino acids. Epitopes may be “conformational” (or “discontinuous”), i.e. composed of discontinuous sequences of the amino acids of the antigenic peptide or protein that they are derived from, but brought together in the three-dimensional structure of e.g. a MHC-complex, or “linear”, i.e. consist of a continuous sequence of amino acids of the antigenic peptides or proteins that they are derived from. The term “epitope” generally encompasses “T cell epitopes” (recognized by T cells via their T cell receptor) and “B cell epitopes” (recognized by B cells via their B cell receptor). “B cell epitopes” are typically located on the outer surface of (native) protein or peptide antigens as defined herein, and may preferably comprise or consist of between 5 to 15 amino acids, more preferably between 5 to 12 amino acids, even more preferably between 6 to 9 amino acids. “T cell epitopes” are typically recognized by T cells in a MHC-I or MHC-II bound form, i.e. as a complex formed by an antigenic protein or peptide fragment comprising the epitope, and a MHC-I or MHC-II surface molecule. “T cell epitopes” may typically have a length of about 6 to about 20 or even more amino acids, T cell epitopes presented by MHC class I molecules may preferably have a length of about 8 to about 10 amino acids, e.g. 8, 9, or 10, (or even 11, or 12 amino acids). T cell epitopes presented by MHC class II molecules may preferably have a length of about 13 or more amino acids, e.g. 13, 14, 15, 16, 17, 18, 19, 20 or even more amino acids. In the context of the present invention, the term “epitope” may in particular refer to T cell epitopes.

[0221] Thus, the term “antigenic (poly-)peptide or protein” refers to a (poly-)peptide comprising, consisting of or being capable of providing at least one (functional) epitope. Artificial nucleic acid (RNA) molecules of the invention may encode full-length antigenic (poly-)peptides or proteins, or preferably fragments thereof. Said fragments may comprise or consist of or be capable of providing (functional) epitopes of said antigenic (poly-)peptides or proteins. A “functional” epitope refers to an epitope capable of inducing a desired adaptive immune response in a subject.

[0222] Artificial nucleic acid (RNA) molecules encoding, in their at least one coding region, at least one antigenic (poly-)peptide or protein may enter the target cells (e.g. professional antigen-presenting cells (APCs), where the at least one antigenic (poly-)peptide or protein is expressed, processed and presented to immune cells (e.g. T cells) on an MHC molecule, preferably resulting in an antigen-specific immune response (e.g. cell-mediated immunity or formation of antibodies). Alternatively, artificial nucleic acid (RNA) molecules encoding, in their at least one coding region, at least one antigenic (poly-)peptide or protein may enter the target cells (e.g. muscle cells, dermal cells) where the at least one antigenic (poly-)peptide or protein is expressed and for instance secreted by the target cell to the extracellular environment, where it encounters cells of the immune system (e.g. B cells, macrophages) and preferably induces an antigen-specific immune response (e.g. formation of antibodies).

[0223] When referring to an artificial nucleic acid (RNA) molecule encoding “at least one antigenic peptide or protein” herein, it is envisaged that said artificial nucleic acid (RNA) molecule may encode one or more full-length antigenic (poly-)peptide(s) or protein(s), or one or more fragment(s), in particular a (functional) epitope(s), of said antigenic (poly-)peptide or protein. Said full-length antigenic (poly-)peptide(s) or protein(s), or its fragment(s), preferably comprises, consists of or is capable of providing at least one (functional) epitope, i.e. said antigenic (poly-)peptide(s) or protein(s) or its fragment(s) preferably either comprise(s) or consist(s) of a native epitope (preferably recognized by B cells) or is capable of being processed and presented by an MHC-I or MHC-II molecule to provide a MHC-bound epitope (preferably recognized by T cells).

[0224] The choice of particular antigenic (poly-)peptides or proteins generally depends on the disease to be treated or prevented. In general, the artificial nucleic acid (RNA) molecule, may encode any antigenic (poly-)peptide or protein associated with a disease amenable to treatment by inducing an immune response against said antigen (e.g. cancer, infections).

[0225] Preferably, artificial nucleic acid molecules according to the invention may comprise at least one coding region encoding a tumor antigen, a pathogenic antigen, an autoantigen, an alloantigen, or an allergenic antigen.

[0226] The term “tumor antigen” refers to antigenic (poly-)peptides or proteins derived from or associated with a (preferably malignant) tumor or a cancer disease. As used herein, the terms “cancer” and “tumor” are used interchangeably to refer to a neoplasm characterized by the uncontrolled and usually rapid proliferation of cells that tend to invade surrounding tissue and to metastasize to distant body sites. The term encompasses benign and malignant neoplasms. Malignancy in cancers is typically characterized by anaplasia, invasiveness, and metastasis; whereas benign malignancies typically have none of those properties. The terms “cancer” and “tumor” in particular refer to neoplasms characterized by tumor growth, but also to cancers of blood and lymphatic system. A “tumor antigen” is typically derived from a tumor/cancer cell, preferably a mammalian tumor/cancer cell, and may be located in or on the surface of a tumor cell derived from a mammalian, preferably from a human, tumor, such as a systemic or a solid tumor. “Tumor antigens” generally include tumor-specific antigens (TSAs) and tumor-associated-antigens (TAAs). TSAs typically result from a tumor specific mutation and are specifically expressed by tumor cells. TAAs, which are more common, are usually presented by both tumor and “normal” (healthy, non-tumor) cells.

[0227] The protein or polypeptide may comprise or consist of a tumour antigen, a fragment, variant or derivative of a tumour antigen. Such nucleic acid molecules are particularly useful for therapeutic purposes, particularly genetic vaccination. Preferably, the tumour antigen may be selected from the group comprising a melanocyte-specific antigen, a cancer-testis antigen or a tumour-specific antigen, preferably a CT-X antigen, a non-X CT-antigen, a binding partner for a CT-X antigen or a binding partner for a non-X CT-antigen or a tumour-specific antigen, more preferably a CT-X antigen, a binding partner for a non-X CT-antigen or a tumour-specific antigen or a fragment, variant or derivative of said tumour antigen; and wherein each of the nucleic acid sequences encodes a different peptide or protein; and wherein at least one of the nucleic acid sequences encodes for 5T4, 707-AP, 9D7, AFP, AlbZIP HPG1, alpha-5-beta-1-integrin, alpha-5-beta-6-integrin, alpha-actinin-4/m, alpha-methylacyl-coenzyme A racemase, A T-4, ARTC1/m, B7H4, BAGE-1, BCL-2, bcr/abl, beta-catenin/m, BING-4, BRCAI/m, BRCA2/m, CA 1 5-3/CA 27-29, CA 19-9, CA72-4, CA125, calreticulin, CAMEL, CASP-8/m, cathepsin B, cathepsin L, CD19, CD20, CD22, CD25, CDE30, CD33, CD4, CD52, CD55, CD56, CD80, CDC27/m, CDK4/m, CDKN2A/m, CEA, CLCA2, CML28, CML66, COA-1/m, coactosin-like protein, collage XXIII, COX-2, CT-9/BRD6, Cten, cyclin B1, cyclin D1, cyp-B, CYPB1, DAM-10, DAM-6, DEK-CAN, EFTUD2/m, EGFR, ELF2/m, EMMPRIN, EpCam, EphA2, EphA3, ErbB3, ETV6-AML1, EZH2, FGF-5, FN, Frau-1, G250, GAGE-1, GAGE-2, GAGE-3, GAGE-4, GAGE-5, GAGE-6, GAGE7b, GAGE-8, GDEP, GnT-V, gp100, GPC3, GPNMB/m, HAGE, HAST-2, hepsin, Her2/neu, HERV-K-MEL, HLA-A*0201-R1 7I, HLA-A1 1/m, HLA-A2/m, HNE, homeobox NKX3.1, HOM-TES-14/SCP-1, HOM-TES-85, HPV-E6, HPV-E7, HSP70-2M, HST-2, hTERT, iCE, IGF-1 R, IL-13Ra2, IL-2R, IL-5, immature laminin receptor, kallikrein-2, kallikrein-4, i67, KIAA0205, KIAA0205/m, KK-LC-1, K-Ras/m, LAGE-A1, LDLR-FUT, MAGE-A1, MAGE-A2, MAGE-A3, MAGE-A4, MAGE-A6, MAGE-A9, MAGE-A10, MAGE-A12, MAGE-B1, MAGE-B2, MAGE-B3, MAGE-B4, MAGE-B5, MAGE-B6, MAGE-B10, MAGE-B1 6, MAGE-B1 7, MAGE-C1, MAGE-C2, MAGE-C3, MAGE-D1, MAGE-D2, MAGE-D4, MAGE-E1, MAGE-E2, MAGE-F1, MAGE-H I, MAGEL2, mammaglobin A, MART-1/melan-A, MART-2, MART-2/m, matrix protein 22, MC1 R, M-CSF, ME 1/m, mesothelin, MG50/PXDN, MMP1 1, MN/CA IX-antigen, MRP-3, MUC-1, MUC-2, MUM-1/m, MUM-2/m, MUM-3/m, myosin class l/m, NA88-A, N-acetylgl ucosaminy transferase-V, Neo-PAP, Neo-PAP/m, NFYC/m, NGEP, NMP22, NPM/ALK, N-Ras/m, NSE, NY-ESO-1, NY-ESO-B, OA1, OFA-iLRP, OGT, OGT/m, OS-9, OS-9/m, osteocalcin, osteopontin, pi 5, p190 minor bcr-abl, p53, p53/m, PAGE-4, PAI-1, PAI-2, PAP, PART-1, PATE, PDEF, Pim-1-Kinase, Pin-1, Pml/PARalpha, POTE, PRAME, PRDX5/m, prostein, proteinase-3, PSA, PSCA, PSGR, PSM, PSMA, PTPRK/m, RAGE-1, RBAF600/m, RHAMM/CD1 68, RU1, RU2, S-100, SAGE, SART-1, SART-2, SART-3, SCC, SIRT2/m, Sp1 7, SSX-1, SSX-2/HOM-MEL-40, SSX-4, STAMP-1, STEAP-1, survivin, survivin-2B, SYT-SSX-1, SYT-SSX-2, TA-90, TAG-72, TARP, TEL-AML1, TGFbeta, TGFbetaRII, TGM-4, TPI/m, TRAG-3, TRG, TRP-1, TRP-2/6b, TRP/INT2, TRP-p8, tyrosinase, UPA, VEGFR1, VEGFR-2/FLK-1, WT1 and a immunoglobulin idiotype of a lymphoid blood cell or a T cell receptor idiotype of a lymphoid blood cell, or a homolog, fragment, variant or derivative of any of these tumor antigens; preferably survivin or a homologue thereof, an antigen from the MAGE-family or a binding partner thereof or a fragment, variant or derivative of said tumour antigen.

[0228] Particularly preferred in this context are the tumour antigens NY-ESO-1, 5T4, MAGE-C1, MAGE-C2, Survivin, Muc-1, PSA, PSMA, PSCA, STEAP and PAP, or homologs, fragments, variants or derivatives of any of these tumor antigens.

[0229] The term “pathogenic antigen” refers to antigenic (poly-)peptides or proteins derived from or associated with pathogens, i.e. viruses, microorganisms, or other substances causing infection and typically disease, including, besides viruses, bacteria, protozoa or fungi. In particular, such “pathogenic antigens” may be capable of eliciting an immune response in a subject, preferably a mammalian subject, more preferably a human. Typically, pathogenic antigens may be surface antigens, e.g. (poly-)peptides or proteins (or fragments of proteins, e.g. the exterior portion of a surface antigen) located at the surface of the pathogen (e.g. its capsid, plasma membrane or cell wall).

[0230] Accordingly, in some preferred embodiments, the artificial nucleic acid (RNA) molecule may encode in its at least one coding region at least one pathogenic antigen selected from a bacterial, viral, fungal or protozoal antigen. The encoded (poly-)peptide or protein may consist or comprise of a pathogenic antigen or a fragment, variant or derivative thereof.

[0231] Pathogenic antigens may preferably be selected from antigens derived from the pathogens Acinetobacter baumannii, Anaplasma genus, Anaplasma phagocytophilum, Ancylostoma braziliense, Ancylostoma duodenale, Arcanobacterium haemolyticum, Ascaris lumbricoides, Aspergillus genus, Astroviridae, Babesia genus, Bacillus anthracis, Bacillus cereus, Bartonella henselae, BK virus, Blastocystis hominis, Blastomyces dermatitidis, Bordetella pertussis, Borrelia burgdorferi, Borrelia genus, Borrelia spp, Brucella genus, Brugia malayi, Bunyaviridae family, Burkholderia cepacia and other Burkholderia species, Burkholderia mallei, Burkholderia pseudomallei, Caliciviridae family, Campylobacter genus, Candida albicans, Candida spp, Chlamydia trachomatis, Chlamydophila pneumoniae, Chlamydophila psittaci, CJD prion, Clonorchis sinensis, Clostridium botulinum, Clostridium difficile, Clostridium perfringens, Clostridium perfringens, Clostridium spp, Clostridium tetani, Coccidioides spp, coronaviruses, Corynebacterium diphtheriae, Coxiella burnetii, Crimean-Congo haemorrhagic fever virus, Cryptococcus neoformans, Cryptosporidium genus, Cytomegalovirus (CMV), Dengue viruses (DEN-1, DEN-2, DEN-3 and DEN-4), Dientamoeba fragilis, Ebolavirus (EBOV), Echinococcus genus, Ehrlichia chaffeensis, Ehrlichia ewingii, Ehrlichia genus, Entamoeba histolytica, Enterococcus genus, Enterovirus genus, Enteroviruses, mainly Coxsackie A virus and Enterovirus 71 (EV71), Epidermophyton spp, Epstein-Barr Virus (EBV), Escherichia coli 01 57:H7, 01 1 1 and O1 04:H4, Fasciola hepatica and Fasciola gigantica, FFI prion, Filarioidea superfamily, Flaviviruses, Francisella tularensis, Fusobacterium genus, Geotrichum candidum, Giardia intestinalis, Gnathostoma spp, GSS prion, Guanarito virus, Haemophilus ducreyi, Haemophilus influenzae, Helicobacter pylori, Henipavirus (Henclra virus Nipah virus), Hepatitis A Virus, Hepatitis B Virus (HBV), Hepatitis C Virus (HCV), Hepatitis D Virus, Hepatitis E Virus, Herpes simplex virus 1 and 2 (HSV-1 and HSV-2), Histoplasma capsulatum, HIV (Human immunodeficiency virus), Hortaea werneckii, Human bocavirus (HBoV), Human herpesvirus 6 (HHV-6) and Human herpesvirus 7 (HHV-7), Human metapneumovirus (hMPV), Human papillomavirus (HPV), Human parainfluenza viruses (HPIV), Japanese encephalitis virus, JC virus, Junin virus, Kingella kingae, Klebsiella granulomatis, Kuru prion, Lassa virus, Legionella pneumophila, Leishmania genus, Leptospira genus, Listeria monocytogenes, Lymphocytic choriomeningitis virus (LCMV), Machupo virus, Malassezia spp, Marburg virus, Measles virus, Metagonimus yokagawai, Microsporidia phylum, Molluscum contagiosum virus (MCV), Mumps virus, Mycobacterium leprae and Mycobacterium lepromatosis, Mycobacterium tuberculosis, Mycobacterium ulcerans, Mycoplasma pneumoniae, Naegleria fowleri, Necator americanus, Neisseria gonorrhoeae, Neisseria meningitidis, Nocardia asteroides, Nocardia spp, Onchocerca volvulus, Orientia tsutsugamushi, Orthomyxoviridae family (Influenza), Paracoccidioides brasiliensis, Paragonimus spp, Paragonimus westermani, Parvovirus B19, Pasteurella genus, Plasmodium genus, Pneumocystis jirovecii, Poliovirus, Rabies virus, Respiratory syncytial virus (RSV), Rhinovirus, rhinoviruses, Rickettsia akari, Rickettsia genus, Rickettsia prowazekii, Rickettsia rickettsii, Rickettsia typhi, Rift Valley fever virus, Rotavirus, Rubella virus, Sabia virus, Salmonella genus, Sarcoptes scabiei, SARS coronavirus, Schistosoma genus, Shigella genus, Sin Nombre virus, Hantavirus, Sporothrix schenckii, Staphylococcus genus, Staphylococcus genus, Streptococcus agalactiae, Streptococcus pneumoniae, Streptococcus pyogenes, Strongyloides stercoralis, Taenia genus, Taenia solium, Tick-borne encephalitis virus (TBEV), Toxocara canis or Toxocara cati, Toxoplasma gondii, Treponema pallidum, Trichinella spiralis, Trichomonas vaginalis, Trichophyton spp, Trichuris trichiura, Trypanosoma brucei, Trypanosoma cruzi, Ureaplasma urealyticum, Varicella zoster virus (VZV), Varicella zoster virus (VZV), Variola major or Variola minor, vCJD prion, Venezuelan equine encephalitis virus, Vibrio cholerae, West Nile virus, Western equine encephalitis virus, Wuchereria bancrofti, Yellow fever virus, Yersinia enterocolitica, Yersinia pestis, and Yersinia pseudotuberculosis, or an isoform, homolog, fragment, variant or derivative of any of these proteins.

[0232] Further preferred pathogenic antigens may be derived from Influenza virus, respiratory syncytial virus (RSV), Herpes simplex virus (HSV), human Papilloma virus (HPV), Human immunodeficiency virus (HIV), Plasmodium, Staphylococcus aureus, Dengue virus, Chlamydia trachomatis, Cytomegalovirus (CMV), Hepatitis B virus (HBV), Mycobacterium tuberculosis, Rabies virus, and Yellow Fever Virus, or an isoform, homolog, fragment, variant or derivative of any of these proteins.

[0233] Further preferred pathogenic antigens may be derived from Agrobacterium tumefaciens, Ajellomyces dermatitidis ATCC 60636, Alphapapillomavirus 10, Andes orthohantavirus, Andes virus CHI-7913, Aspergillus terreus NIH2624, Avian hepatitis E virus, Babesia microti, Bacillus anthracis, Bacteria, Betacoronavirus England 1, Blattella germanica, Bordetella pertussis, Borna disease virus Giessen strain He/80, Borrelia burgdorferi B31, Borrelia burgdorferi CA12, Borrelia burgdorferi N40, Borrelia burgdorferi ZS7, Borrelia garinii IP90, Borrelia hermsii, Borreliella afzelii, Borreliella burgdorferi, Borreliella garinii, Bos taurus, Brucella melitensis, Brugia malayi, Bundibugyo ebolavirus, Burkholderia pseudomallei, Burkholderia pseudomallei K96243, Campylobacter jejuni, Campylobacter upsaliensis, Candida albicans, Cavia porcellus, Chikungunya virus, Chikungunya virus MY/08/065, Chikungunya virus Singapore/11/2008, Chikungunya virus strain LR2006_OPY1 IMT/Reunion Island/2006, Chikungunya virus strain S27-African prototype, Chlamydia pneumoniae, Chlamydia trachomatis, Chlamydia trachomatis Serovar D, Chlamydiae, Clostridioides difficile, Clostridium difficile BI/NAP1/027, Clostridium tetani, Convict Creek 107 virus, Corynebacterium diphtheriae, Cowpox virus (Brighton Red) White-pock, Coxsackievirus A16, Coxsackievirus A9, Coxsackievirus B1, Coxsackievirus B2, Coxsackievirus B3, Coxsackievirus B4, Crimean-Congo hemorrhagic fever orthonairovirus, Cryptosporidium parvum, Dengue virus, Dengue virus 1, Dengue virus 1 Nauru/West Pac/1974, Dengue virus 1 PVP159, Dengue virus 1 Singapore/S275/1990, Dengue virus 2, Dengue virus 2 D2/SG/05K4155DK1/2005, Dengue virus 2 Jamaica/1409/1983, Dengue virus 2 Puerto Rico/PR159-S1/1969, Dengue virus 2 strain 43, Dengue virus 2 Thailand/16681/84, Dengue virus 2 Thailand/NGS-C/1944, Dengue virus 3, Dengue virus 4, Dengue virus 4 Dominica/814669/1981, Dengue virus 4 Thailand/0348/1991, Dengue virus type 1 Hawaii, Ebola virus—Mayinga, Zaire, 1976, Ebolavirus, Echinococcus granulosus, Echinococcus multilocularis, Echovirus E11, Echovirus E9, Ehrlichia canis str. Jake, Ehrlichia chaffeensis, Ehrlichia chaffeensis str. Arkansas, Entamoeba histolytica, Entamoeba histolytica YS-27, Enterococcus faecium, Enterovirus A, Enterovirus A71, Enterovirus C, Escherichia coli, Fasciola gigantica, Fasciola hepatica, Four Corners hantavirus, Francisella tularensis, Francisella tularensis subsp. holarctica LVS, Francisella tularensis subsp. tularensis SCHU S4, Gambierdiscus toxicus, GB virus C, Glossina morsitans morsitans, Gnathostoma binucleatum, Gp160, H1N1 subtype, H5N1 subtype, Haemophilus influenzae NTHi 1128, Haemophilus influenzae Serotype B, Haemophilus influenzae Subtype 1H, Hantaan orthohantavirus, Hantaan virus 76-118, HBV genotype D, Helicobacter pylori, Helicobacter pylori 26695, Heligmosomoides polygyrus, Hepatitis B virus, Hepatitis B virus adr4, Hepatitis B virus ayw/France/Tiollais/1979, Hepatitis B virus genotype D, Hepatitis B virus subtype adr, Hepatitis B virus subtype adw, Hepatitis B virus subtype adw2, Hepatitis B virus subtype adyw, Hepatitis B virus subtype AYR, Hepatitis B virus subtype ayw, Hepatitis C virus, Hepatitis C virus (isolate 1), Hepatitis C virus (isolate BK), Hepatitis C virus (isolate Con1), Hepatitis C virus (isolate Glasgow), Hepatitis C virus (isolate H), Hepatitis C virus (isolate H77), Hepatitis C virus (isolate HC-G9), Hepatitis C virus (isolate HCV-K3a/650), Hepatitis C virus (isolate Japanese), Hepatitis C virus (isolate JK049), Hepatitis C virus (isolate NZL1), Hepatitis C virus (isolate Taiwan), Hepatitis C virus genotype 1, Hepatitis C virus genotype 2, Hepatitis C virus genotype 3, Hepatitis C virus genotype 4, Hepatitis C virus genotype 5, Hepatitis C virus genotype 6, Hepatitis C virus HCT18, Hepatitis C virus HCV-KF, Hepatitis C virus isolate HC-J1, Hepatitis C virus isolate HC-J6, Hepatitis C virus isolate HC-J8, Hepatitis C virus JFH-1, Hepatitis C virus subtype 1a, Hepatitis C virus subtype 1a Chiron Corp., Hepatitis C virus subtype 1b, Hepatitis C virus subtype 1b AD78, Hepatitis C virus subtype 1b isolate BE-11, Hepatitis C virus subtype 1b JK1, Hepatitis C virus subtype 2a, Hepatitis C virus subtype 2b, Hepatitis C virus subtype 3a, Hepatitis C virus subtype 5a, Hepatitis C virus subtype 6a, Hepatitis delta virus, Hepatitis delta virus TW2667, Hepatitis E virus, Hepatitis E virus (strain Burma), Hepatitis E virus (strain Mexico), Hepatitis E virus SAR-55, Hepatitis E virus type 3 Kernow-C1, Hepatitis E virus type 4 JAK-Sai, Hepatovirus A, Heron hepatitis B virus, Herpes simplex virus (type 1/strain 17), Herpesviridae, HIV-1 CRF01_AE, HIV-1 group O, HIV-1 M:A, HIV-1 M:B, HIV-1 M:B_89.6, HIV-1 M:B_HXB2R, HIV-1 M:B_MN, HIV-1 M:C, HIV-1 M:CRF01_AE, HIV-1 M:G, HIV-1 O_ANT70, Human adenovirus 11, Human adenovirus 2, Human adenovirus 40, Human adenovirus 5, Human alphaherpesvirus 1, Human alphaherpesvirus 2, Human alphaherpesvirus 3, Human betaherpesvirus 5, Human betaherpesvirus 6B, Human bocavirus 1, Human bocavirus 2, Human bocavirus 3, Human coronavirus 229E, Human coronavirus OC43, Human endogenous retrovirus, Human endogenous retrovirus H, Human endogenous retrovirus K, Human enterovirus 71 Subgenogroup C4, Human gammaherpesvirus 4, Human gammaherpesvirus 8, Human hepatitis A virus Hu/Australia/HM175/1976, Human herpesvirus 1 strain KOS, Human herpesvirus 2 strain 333, Human herpesvirus 2 strain HG52, Human herpesvirus 3 H-551, Human herpesvirus 3 strain Oka vaccine, Human herpesvirus 4 strain B95-8, Human herpesvirus 4 type 1, Human herpesvirus 4 type 2, Human herpesvirus 5 strain AD169, Human herpesvirus 5 strain Towne, Human herpesvirus 6 (strain Uganda-1102), Human herpesvirus 7 strain JI, Human immunodeficiency virus 1, Human immunodeficiency virus 2, Human immunodeficiency virus type 1 (isolate YU2), Human immunodeficiency virus type 1 (JRCSF ISOLATE), Human immunodeficiency virus type 1 (NEW YORK-5 ISOLATE), Human immunodeficiency virus type 1 (SF162 ISOLATE), Human immunodeficiency virus type 1 (SF33 ISOLATE), Human immunodeficiency virus type 1 BH10, Human metapneumovirus, Human orthopneumovirus, Human papillomavirus, Human papillomavirus type 11, Human papillomavirus type 16, Human papillomavirus type 18, Human papillomavirus type 29, Human papillomavirus type 31, Human papillomavirus type 33, Human papillomavirus type 35, Human papillomavirus type 39, Human papillomavirus type 44, Human papillomavirus type 45, Human papillomavirus type 51, Human papillomavirus type 52, Human papillomavirus type 58, Human papillomavirus type 59, Human papillomavirus type 6, Human papillomavirus type 68, Human papillomavirus type 6b, Human papillomavirus type 73, Human parainfluenza 3 virus (strain NIH 47885), Human parechovirus 1, Human parvovirus 4, Human parvovirus B19, Human poliovirus 1, Human poliovirus 1 Mahoney, Human poliovirus 3, Human polyomavirus 1, Human respiratory syncytial virus (strain RSB1734), Human respiratory syncytial virus (strain RSB6190), Human respiratory syncytial virus (strain RSB6256), Human respiratory syncytial virus (strain RSB642), Human respiratory syncytial virus (subgroup B/strain 18537), Human respiratory syncytial virus A, Human respiratory syncytial virus A strain Long, Human respiratory syncytial virus A2, Human respiratory syncytial virus S2, Human respirovirus 3, Human rhinovirus A89, Human rotavirus A, Human T-cell lymphotrophic virus type 1 (Caribbean isolate), Human T-cell lymphotrophic virus type 1 (isolate MT-2), Human T-cell lymphotrophic virus type 1 (strain ATK), Human T-cell lymphotropic virus type 1 (african isolate), Human T-lymphotropic virus 1, Human T-lymphotropic virus 2, Influenza A virus, Influenza A virus (A/Anhui/1/2005(H5N1)), Influenza A virus (A/Anhui/PA-1/2013(H7N9)), Influenza A virus (A/Argentina/3779/94(H3N2)), Influenza A virus (A/Auckland/1/2009(H1N1)), Influenza A virus (A/Bar-headed Goose/Qinghai/61/05(H5N1)), Influenza A virus (A/Brevig Mission/1/1918(H1N1)), Influenza A virus (A/California/04/2009(H1N1)), Influenza A virus (A/California/07/2009(H1N1)), Influenza A virus (A/California/08/2009(H1N1)), Influenza A virus (A/California/10/1978(H1N1)), Influenza A virus (A/Christchurch/2/1988(H3N2)), Influenza A virus (A/Cordoba/3278/96(H3N2)), Influenza A virus (A/France/75/97(H3N2)), Influenza A virus (A/Fujian/411/2002(H3N2)), Influenza A virus (A/Hong Kong/01/2009(H1N1)), Influenza A virus (A/Hong Kong/1/1968(H3N2)), Influenza A virus (A/Indonesia/CDC699/2006(H5N1)), Influenza A virus (A/Iran/1/1957(H2N2)), Influenza A virus (A/Memphis/13/1978(H1N1)), Influenza A virus (A/Memphis/4/1980(H3N2)), Influenza A virus (A/Nanchang/58/1993(H3N2)), Influenza A virus (A/New York/232/2004(H3N2)), Influenza A virus (A/New_York/15/94(H3N2)), Influenza A virus (A/New_York/17/94(H3N2)), Influenza A virus (A/Ohio/3/95(H3N2)), Influenza A virus (A/Otago/5/2005(H1N1)), Influenza A virus (A/Puerto Rico/8/1934(H1N1)), Influenza A virus (A/Shangdong/5/94(H3N2)), Influenza A virus (A/Solomon Islands/3/2006 (Egg passage)(H1N1)), Influenza A virus (A/South Carolina/1/1918(H1N1)), Influenza A virus (A/swine/Hong Kong/126/1982(H3N2)), Influenza A virus (A/swine/Iowa/15/1930(H1N1)), Influenza A virus (A/Sydney/05/97-like(H3N2)), Influenza A virus (A/Texas/1/1977(H3N2)), Influenza A virus (A/Udorn/307/1972(H3N2)), Influenza A virus (A/Uruguay/716/2007(H3N2)), Influenza A virus (A/USSR/26/1985(H3N2)), Influenza A virus (A/Viet Nam/1203/2004(H5N1)), Influenza A virus (A/Vietnam/1194/2004(H5N1)), Influenza A virus (A/Wellington/75/2006(H1N1)), Influenza A virus (A/Wilson-Smith/1933(H1N1)), Influenza A virus (A/Wuhan/359/1995(H3N2)), Influenza A virus (STRAIN A/EQUINE/NEW MARKET/76), Influenza B virus, Japanese encephalitis virus, Japanese encephalitis virus strain Nakayama, Japanese encephalitis virus Vellore P20778, JC polyomavirus, Junin mammarenavirus, Klebsiella pneumoniae, Kumlinge virus, Lake Victoria marburgvirus—Popp, Lassa mammarenavirus, Lassa virus Josiah, Leishmania, Leishmania aethiopica, Leishmania braziliensis, Leishmania braziliensis MHOM/BR/75/M2904, Leishmania chagasi, Leishmania donovani, Leishmania infantum, Leishmania major, Leishmania major strain Friedlin, Leishmania panamensis, Leishmania pifanoi, Leptospira interrogans, Leptospira interrogans serovar Australis, Leptospira interrogans serovar Copenhageni, Leptospira interrogans serovar Copenhageni str. Fiocruz 1-130, Leptospira interrogans serovar Lai, Leptospira interrogans serovar Lai str. HY-1, Leptospira interrogans serovar Pomona, Little cherry virus 1, Lymphocytic choriomeningitis mammarenavirus, Measles morbillivirus, Measles virus strain Edmonston, Merkel cell polyomavirus, Mobala mammarenavirus, Modified Vaccinia Ankara virus, Moraxella catarrhalis O35E, Mupapillomavirus 1, Mus musculus, Mycobacterium, Mycobacterium abscessus, Mycobacterium avium, Mycobacterium avium serovar 8, Mycobacterium avium subsp. paratuberculosis, Mycobacterium bovis AN5, Mycobacterium bovis BCG, Mycobacterium bovis BCG str. Pasteur 1173P2, Mycobacterium fortuitum subsp. fortuitum, Mycobacterium gilvum, Mycobacterium intracellulare, Mycobacterium kansasii, Mycobacterium leprae, Mycobacterium leprae TN, Mycobacterium marinum, Mycobacterium neoaurum, Mycobacterium phlei, Mycobacterium smegmatis, Mycobacterium tuberculosis, Mycobacterium tuberculosis CDC1551, Mycobacterium tuberculosis H37Ra, Mycobacterium tuberculosis H37Rv, Mycobacterium ulcerans, Mycoplasma pneumoniae, Mycoplasma pneumoniae FH, Mycoplasma pneumoniae M129, Necator americanus, Neisseria gonorrhoeae, Neisseria meningitidis serogroup B H44/76, Nipah henipavirus, Norovirus genogroup 2 Camberwell 1890, Onchocerca volvulus, Orientia tsutsugamushi, Oryctolagus cuniculus, Pan troglodytes, Paracoccidioides brasiliensis, Paracoccidioides brasiliensis B339, Plasmodium falciparum, Plasmodium falciparum 3D7, Plasmodium falciparum 7G8, Plasmodium falciparum FC27/Papua New Guinea, Plasmodium falciparum FCR-3/Gambia, Plasmodium falciparum isolate WELLCOME, Plasmodium falciparum K1, Plasmodium falciparum LE5, Plasmodium falciparum Mad20/Papua New Guinea, Plasmodium falciparum NF54, Plasmodium falciparum Palo Alto/Uganda, Plasmodium falciparum RO-33, Plasmodium reichenowi, Plasmodium vivax, Plasmodium vivax NK, Plasmodium vivax Sal-1, Plasmodium vivax strain Belem, Plasmodium vivax-like sp., Porphyromonas gingivalis, Porphyromonas gingivalis 381, Porphyromonas gingivalis OMZ 409, Prevotella sp. oral taxon 472 str. F0295, Pseudomonas aeruginosa, Puumala orthohantavirus, Puumala virus (strain Umea/hu), Puumala virus sotkamo/v-2969/81, Pythium insidiosum, Ravn-Ravn, Kenya, 1987, Respiratory syncytial virus, Rhodococcus fascians, Rhodococcus hoagii, Rubella virus, Rubella virus strain M33, Rubella virus strain Therien, Rubella virus vaccine strain RA27/3, Saccharomyces cerevisiae, Saimiriine gammaherpesvirus 2, Salmonella enterica subsp. enterica serovar Typhi, Salmonella ‘group A’, Salmonella ‘group D’, Salmonella sp. ‘group B’, Sapporo rat virus, SARS coronavirus, SARS coronavirus BJ01, SARS coronavirus TJF, SARS coronavirus Tor2, SARS coronavirus Urbani, Schistosoma, Schistosoma japonicum, Schistosoma mansoni, Schistosoma mansoni Puerto Rico, Sin Nombre orthohantavirus, Sindbis virus, Staphylococcus aureus, Staphylococcus aureus subsp. aureus COL, Staphylococcus aureus subsp. aureus MRSA252, Streptococcus, Streptococcus mutans, Streptococcus mutans MT 8148, Streptococcus oralis, Streptococcus pneumoniae, Streptococcus pyogenes, Streptococcus pyogenes serotype M24, Streptococcus pyogenes serotype M3 D58, Streptococcus pyogenes serotype M5, Streptococcus pyogenes serotype M6, Streptococcus sp. ‘group A’, Taenia crassiceps, Taenia saginata, Taenia solium, Tick-borne encephalitis virus, Toxocara canis, Toxoplasma gondii, Toxoplasma gondii ME49, Toxoplasma gondii RH, Toxoplasma gondii type I, Toxoplasma gondii type II, Toxoplasma gondii type III, Toxoplasma gondii VEG, Treponema pallidum, Treponema pallidum subsp. pallidum str. Nichols, Trichomonas vaginalis, Triticum aestivum, Trypanosoma brucei brucei, Trypanosoma brucei gambiense, Trypanosoma cruzi, Trypanosoma cruzi Dm28c, Trypanosoma cruzi strain CL Brener, Vaccinia virus, Vesicular stomatitis virus, Vibrio cholerae, West Nile virus, West Nile virus NY-99, Wuchereria bancrofti, Yellow fever virus 17D/Tiantan, Yersinia enterocolitica, Zaire ebolavirus, Zika virus, or an isoform, homolog, fragment, variant or derivative of any of these proteins.

[0234] Artificial nucleic acid molecules of the invention encoding preferred influenza-derived pathogenic antigens may preferably comprise a coding region comprising or consisting of a nucleic acid sequence according to any one of the SEQ ID NOs as shown in FIG. 1, FIG. 2, FIG. 3 or FIG. 4 or respectively Table 1, Table 2, Table 3 or Table 4 of international patent application PCT/EP2017/060663, or a fragment or variant of any of these sequences, in particular a nucleic acid sequence having a sequence identity of at least 50%, 60%, 70%, 80%, 81%, 82%, 83%, 84%, 85%, 86%, 87%, 88%, 89%, 90%, 91%, 92%, 93%, 94%, 95%, 96%, 97%, 98%, or 99%, preferably at least 80% to any of these sequences. In this context, the disclosure of PCT/EP2017/060663 is incorporated herein by reference.

[0235] Artificial nucleic acid molecules of the invention encoding further preferred influenza-derived pathogenic antigens may preferably comprise a coding region comprising or consisting of a nucleic acid sequence according to any one of the SEQ ID NOs as shown in FIG. 20, FIG. 21, FIG. 22, or FIG. 23 or respectively Table 1, Table 2, Table 3 or Table 4 of international patent application PCT/EP2017/064066, or a fragment or variant of any of these sequences, in particular a nucleic acid sequence having a sequence identity of at least 50%, 60%, 70%, 80%, 81%, 82%, 83%, 84%, 85%, 86%, 87%, 88%, 89%, 90%, 91%, 92%, 93%, 94%, 95%, 96%, 97%, 98%, or 99%, preferably at least 80% to any of these sequences. In this context, the disclosure of PCT/EP2017/064066 is incorporated herein by reference.

[0236] Artificial nucleic acid molecules of the invention encoding preferred rabies virus-derived pathogenic antigens may preferably comprise a coding region comprising or consisting of a nucleic acid sequence according to SEQ ID NO: 24 or SEQ ID NO: 25 of international patent application WO 2015/024665 A1, or a fragment or variant of any of these sequences, in particular a nucleic acid sequence having a sequence identity of at least 50%, 60%, 70%, 80%, 81%, 82%, 83%, 84%, 85%, 86%, 87%, 88%, 89%, 90%, 91%, 92%, 93%, 94%, 95%, 96%, 97%, 98%, or 99%, preferably at least 80% to any of these sequences. In this context, the disclosure of WO 2015/024665 A1 is incorporated herein by reference.

[0237] Artificial nucleic acid molecules of the invention encoding further preferred rabies virus-derived pathogenic antigens may preferably comprise a coding region comprising or consisting of a nucleic acid sequence according to SEQ ID NO: 24 or Table 5 of international patent application PCT/EP2017/064066, or a fragment or variant of any of these sequences, in particular a nucleic acid sequence having a sequence identity of at least 50%, 60%, 70%, 80%, 81%, 82%, 83%, 84%, 85%, 86%, 87%, 88%, 89%, 90%, 91%, 92%, 93%, 94%, 95%, 96%, 97%, 98%, or 99%, preferably at least 80% to any of these sequences. In this context, the disclosure of PCT/EP2017/064066 is incorporated herein by reference.

[0238] Artificial nucleic acid molecules of the invention encoding preferred RSV-derived pathogenic antigens may preferably comprise a coding region comprising or consisting of a nucleic acid sequence according to any one of SEQ ID NOs: 31 to 35 of international patent application WO 2015/024668 A2, or a fragment or variant of any of these sequences, in particular a nucleic acid sequence having a sequence identity of at least 50%, 60%, 70%, 80%, 81%, 82%, 83%, 84%, 85%, 86%, 87%, 88%, 89%, 90%, 91%, 92%, 93%, 94%, 95%, 96%, 97%, 98%, or 99%, preferably at least 80% to any of these sequences. In this context, the disclosure of WO 2015/024668 A2 is incorporated herein by reference.

[0239] Artificial nucleic acid molecules of the invention encoding preferred Ebola or Marburgvirus-derived pathogenic antigens may preferably comprise a coding region comprising or consisting of a nucleic acid sequence according to any one of SEQ ID NOs: 20 to 233 of international patent application WO 2016/097065 A1, or a fragment or variant of any of these sequences, in particular a nucleic acid sequence having a sequence identity of at least 50%, 60%, 70%, 80%, 81%, 82%, 83%, 84%, 85%, 86%, 87%, 88%, 89%, 90%, 91%, 92%, 93%, 94%, 95%, 96%, 97%, 98%, or 99%, preferably at least 80% to any of these sequences. In this context, the disclosure of WO 2016/097065 A1 is incorporated herein by reference.

[0240] Artificial nucleic acid molecules of the invention encoding preferred Zikavirus-derived pathogenic antigens may preferably comprise a coding region comprising or consisting of a nucleic acid sequence according to any one of SEQ ID NOs: 1 to 11759 or Table 1, Table 1A, Table 2, Table 2A, Table 3, Table 3A, Table 4, Table 4A, Table 5, Table 5A, Table 6, Table 6A, Table 7, Table 8, or Table 14 of international patent application WO 2017/140905 A1, or a fragment or variant of any of these sequences, in particular a nucleic acid sequence having a sequence identity of at least 50%, 60%, 70%, 80%, 81%, 82%, 83%, 84%, 85%, 86%, 87%, 88%, 89%, 90%, 91%, 92%, 93%, 94%, 95%, 96%, 97%, 98%, or 99%, preferably at least 80% to any of these sequences. In this context, the disclosure of WO 2017/140905 A1 is incorporated herein by reference.

[0241] Artificial nucleic acid molecules of the invention encoding preferred Norovirus-derived pathogenic antigens may preferably comprise a coding region comprising or consisting of a nucleic acid sequence according to any one of SEQ ID NOs: 1 to 39746 or Table 1 of international patent application PCT/EP2017/060673, or a fragment or variant of any of these sequences, in particular a nucleic acid sequence having a sequence identity of at least 50%, 60%, 70%, 80%, 81%, 82%, 83%, 84%, 85%, 86%, 87%, 88%, 89%, 90%, 91%, 92%, 93%, 94%, 95%, 96%, 97%, 98%, or 99%, preferably at least 80% to any of these sequences. In this context, the disclosure of PCT/EP2017/060673 is incorporated herein by reference.

[0242] Artificial nucleic acid molecules of the invention encoding preferred Rotavirus-derived pathogenic antigens may preferably comprise a coding region comprising or consisting of a nucleic acid sequence according to any one of SEQ ID NOs: 1 to 3593 or Tables 1-20 of international patent application WO 2017/081110 A1, or a fragment or variant of any of these sequences, in particular a nucleic acid sequence having a sequence identity of at least 50%, 60%, 70%, 80%, 81%, 82%, 83%, 84%, 85%, 86%, 87%, 88%, 89%, 90%, 91%, 92%, 93%, 94%, 95%, 96%, 97%, 98%, or 99%, preferably at least 80% to any of these sequences. In this context, the disclosure of WO 2017/081110 A1 is incorporated herein by reference.

[0243] The term “autoantigen” refers to an endogenous “self-” antigen that—despite being a normal body constituent—induces an autoimmune reaction in the host. In the context of the present invention, autoantigens are preferably of human origin. The provision of an artificial nucleic acid (RNA) molecule encoding an antigenic (poly-)peptide or protein derived from an autoantigen can, for instance, be used to induce immune tolerance towards said autoantigen. Exemplary autoantigens in the context of the present invention include, without limitation, autoantigen derived or selected from 60 kDa chaperonin 2, Lipoprotein LpqH, Melanoma antigen recognized by T-cells 1, MHC class I polypeptide-related sequence A, Parent Protein, Structural polyprotein, Tyrosinase, Myelin proteolipid protein, Epstein-Barr nuclear antigen 1, Envelope glycoprotein GP350, Genome polyprotein, Collagen alpha-1(II) chain, Aggrecan core protein, Melanocyte-stimulating hormone receptor, Acetylcholine receptor subunit alpha, 60 kDa heat shock protein, mitochondrial, Histone H4, Myosin-11, Glutamate decarboxylase 2, 60 kDa chaperonin, PqqC-like protein, Thymosin beta-10, Myelin basic protein, Epstein-Barr nuclear antigen 4, Melanocyte protein PMEL, HLA class II histocompatibility antigen, DQ beta 1 chain, Latent membrane protein 2, Integrin beta-3, Nucleoprotein, 60S ribosomal protein L10, Protein BOLF1, 60S acidic ribosomal protein P2, Latent membrane protein 1, Collagen alpha-2(VI) chain, Exodeoxyribonuclease V, Gamma, Trans-activator protein BZLF1, S-arrestin, HLA class I histocompatibility antigen, A-3 alpha chain, Protein CT_579, Matrin-3, Envelope glycoprotein B, ATP-dependent zinc metalloprotease FtsH, U1 small nuclear ribonucleoprotein 70 kDa, CD48 antigen, Tubulin beta chain, Actin, cytoplasmic 1, Epstein-Barr nuclear antigen 3, NEDD4 family-interacting protein 1, 60S ribosomal protein L28, Immediate-early protein 2, Insulin, isoform 2, Keratin, type II cytoskeletal 3, Matrix protein 1, Histone H2A.Z, mRNA export factor ICP27 homolog, Small nuclear ribonucleoprotein-associated proteins B and B′, Large cysteine-rich periplasmic protein OmcB, Smoothelin, Small nuclear ribonucleoprotein Sm D1, Acetylcholine receptor subunit epsilon, Invasin repeat family phosphatase, Alpha-crystallin B chain, HLA class II histocompatibility antigen, DRB1-13 beta chain, HLA class II histocompatibility antigen, DRB1-4 beta chain, Dihydrolipoyllysine-residue acetyltransferase component of pyruvate dehydrogenase complex, mitochondrial, Keratin, type I cytoskeletal 18, Epstein-Barr nuclear antigen 6, Protein Tax-1, Vimentin, Keratin, type I cytoskeletal 16, Keratin, type I cytoskeletal 10, HLA class I histocompatibility antigen, B-27 alpha chain, Thyroglobulin, Acetylcholine receptor subunit gamma, Chaperone protein DnaK, Protein U24, Na(+)-translocating NADH-quinone reductase subunit A, 65 kDa phosphoprotein, Probable ATP-dependent Clp protease ATP-binding subunit, Probable outer membrane protein PmpC, Heat shock 70 kDa protein 1B, Hemagglutinin, Tetanus toxin, Enolase, Ras-associated and pleckstrin homology domains-containing protein 1, Keratin, type II cytoskeletal 7, Myosin-9, Histone H1-like protein Hc1, Envelope glycoprotein gp160, Urease subunit beta, Vasoactive intestinal polypeptide receptor 1, Viral interleukin-10 homolog, Histone H3.3, Replication protein A 32 kDa subunit, Probable outer membrane protein PmpD, Insulin-2, L-dopachrome tautomerase, Keratin, type I cytoskeletal 9, Envelope glycoprotein H, DNA polymerase catalytic subunit, Beta-2-glycoprotein 1, Envelope glycoprotein gp62, Serum albumin, Major DNA-binding protein, HLA class I histocompatibility antigen, A-2 alpha chain, Myeloblastin, POTE ankyrin domain family member I, Protein E7, Predicted Efflux Protein, Replication and transcription activator, Gag-Pro-Pol polyprotein, Capsid protein VP26, Major capsid protein, Apoptosis regulator BHRF1, Epstein-Barr nuclear antigen 2, HLA class I histocompatibility antigen, B-7 alpha chain, Calreticulin, Gamma-secretase C-terminal fragment 59, Insulin, Glucose-6-phosphatase 2, Islet amyloid polypeptide, Receptor-type tyrosine-protein phosphatase N2, Receptor-type tyrosine-protein phosphatase-like N, Islet cell autoantigen 1, Bos d 6, Glutamate decarboxylase 1, 60S ribosomal protein L29, 28S ribosomal protein S31, mitochondrial, HLA class II histocompatibility antigen, DRB1-16 beta chain, Collagen alpha-3(IV) chain, Glucose-6-phosphatase, Glucose-6-phosphatase 3, Collagen alpha-5(IV) chain, Protein Nef, Glial fibrillary acidic protein, Fibrillin-1, Tenascin, Stromelysin-1, Interstitial collagenase, Calpain-2 catalytic subunit, Chondroitin sulfate proteoglycan 4, Fibrinogen beta chain, Chaperone protein DnaJ, Chitinase-3-like protein 1, Matrix metalloproteinase-16, DNA topoisomerase 1, Follistatin-related protein 1, Ig gamma-1 chain C region, Ig gamma-3 chain C region, Collagen alpha-2(XI) chain, Desmoglein-3, Fibrinogen alpha chain, Filaggrin, T-cell receptor beta chain V region CTL-L17, T-cell receptor beta-1 chain C region, Ig heavy chain V-I region EU, Collagen alpha-1(IV) chain, HLA class I histocompatibility antigen, Cw-7 alpha chain, HLA class I histocompatibility antigen, B-35 alpha chain, HLA class I histocompatibility antigen, B-38 alpha chain, High mobility group protein B2, Ig heavy chain V-II region ARH-77, HLA class II histocompatibility antigen, DR beta 4 chain, Ig kappa chain C region, Alpha-enolase, Lysosomal-associated transmembrane protein 5, HLA class I histocompatibility antigen, B-52 alpha chain, Heterogeneous nuclear ribonucleoproteins A2/B1, T-cell receptor beta chain V region YT35, Ig gamma-4 chain C region, T-cell receptor beta-2 chain C region, DnaJ homolog subfamily B member 2, DnaJ homolog subfamily A member i, Ig kappa chain V-IV region Len, Ig heavy chain V-II region OU, Ig kappa chain V-IV region B17, 2′, 3′-cyclic-nucleotide 3′-phosphodiesterase, Ig heavy chain V-II region MCE, Ig kappa chain V-III region HIC, Ig heavy chain V-II region COR, Myelin-oligodendrocyte glycoprotein, Ig kappa chain V-II region RPMI 6410, Ig kappa chain V-II region GM607, Immunoglobulin lambda-like polypeptide 5, Ig heavy chain V-II region WAH, Biotin-protein ligase, Oligodendrocyte-myelin glycoprotein, Transaldolase, DNA helicase/primase complex-associated protein, Interferon beta, Myelin-associated oligodendrocyte basic protein, Myelin-associated glycoprotein, Fusion glycoprotein F0, Myelin protein P0, Ig lambda chain V-II region MGC, DNA primase, Minor capsid protein L2, Myelin P2 protein, Peripheral myelin protein 22, Retinol-binding protein 3, Butyrophilin subfamily 1 member A1, Alkaline nuclease, Claudin-11, N-acetylmuramoyl-L-alanine amidase CwlH, GTPase Der, Possible transposase, ABC transporter, ATP-binding protein, putative, Collagen alpha-2(IV) chain, Calpastatin, Ig kappa chain V-III region SIE, E3 ubiquitin-protein ligase TRIM68, Glutamate receptor ionotropic, NMDA 2A, Spectrin alpha chain, non-erythrocytic 1, Lupus La protein, Complement C1q subcomponent subunit A, U1 small nuclear ribonucleoprotein A, 60 kDa SS-A/Ro ribonucleoprotein, DNA repair protein XRCC4, Histone H3-like centromeric protein A, Histone H1.4, Putative HTLV-1-related endogenous sequence, HLA class II histocompatibility antigen, DRB1-3 chain, HLA class II histocompatibility antigen, DRB1-1 beta chain, Small nuclear ribonucleoprotein Sm D3, Tumor necrosis factor receptor superfamily member 6, Phosphomannomutase/phosphoglucomutase, Tripartite terminase subunit UL15, Proteasome subunit beta type-3, Proliferating cell nuclear antigen, Inner capsid protein sigma-2, Histone H2B type 1, E3 ubiquitin-protein ligase TRIM21, DNA-directed RNA polymerase II subunit RPB1, X-ray repair cross-complementing protein 6, U1 small nuclear ribonucleoprotein C, Caspase-8, 60S ribosomal protein L7, 5-hydroxytryptamine receptor 4, Small nuclear ribonucleoprotein-associated protein N, Exportin-1, 60S acidic ribosomal protein P0, Neurofilament heavy polypeptide, putative env, T-cell receptor alpha chain C region, T-cell receptor alpha chain V region CTL-L17, RNA polymerase sigma factor SigA, Small nuclear ribonucleoprotein Sm D2, Immunoglobulin iota chain, Ig kappa chain V-III region WOL, Histone H2B type 1-F/J/L, High mobility group protein B1, X-ray repair cross-complementing protein 5, Muscarinic acetylcholine receptor M3, Major viral transcription factor ICP4, Voltage-dependent P/Q-type calcium channel subunit alpha-1A, Heat shock protein HSP 90-beta, DNA topoisomerase 2-beta, Histone H3.1, Tumor necrosis factor ligand superfamily member 6, Phospho-N-acetylmuramoyl-pentapeptide-transferase, Hemoglobin subunit alpha, Apolipoprotein E, CD99 antigen, ATP synthase subunit beta, mitochondrial, Acetylcholine receptor subunit delta, Acyl-CoA dehydrogenase family member 10, KN motif and ankyrin repeat domain-containing protein 3, SAM and SH3 domain-containing protein 1, Elongation factor 1-alpha 1, GTP-binding nuclear protein Ran, Myosin-7, Sal-like protein 1, IgGFc-binding protein, E3 ubiquitin-protein ligase SIAH1, Muscleblind-like protein 2, Annexin A1, Protein PET117 homolog, mitochondrial, Nuclear ubiquitous casein and cyclin-dependent kinase substrate 1, Pleiotropic regulator 1, NADH dehydrogenase [ubiquinone] 1 alpha subcomplex subunit 3, Guanine nucleotide-binding protein G(o) subunit alpha, Microtubule-associated protein 1B, L-serine dehydratase/L-threonine deaminase, Centromere protein J, SH3 and multiple ankyrin repeat domains protein 3, Fumarate hydratase, mitochondrial, Cofilin-1, Rho GTPase-activating protein 9, Phosphatidate cytidylyltransferase 1, Neurofilament light polypeptide, Calsyntenin-1, GPI transamidase component PIG-T, Perilipin-3, Protein unc-13 homolog D, WD40 repeat-containing protein SMU1, Neurofilament medium polypeptide, Protein S100-B, Carboxypeptidase E, Neurexin-2-beta, NAD-dependent protein deacetylase sirtuin-2, Tripartite motif-containing protein 40, Neurexin-1-beta, Annexin A11, Hemoglobin subunit beta, Glyceraldehyde-3-phosphate dehydrogenase, Histidine triad nucleotide-binding protein 3, ATP synthase subunit e, mitochondrial, 10 kDa heat shock protein, mitochondrial, Cellular tumor antigen p53, Leukocyte-associated immunoglobulin-like receptor 1, Tubulin alpha-1B chain, Splicing factor, proline- and glutamine-rich, Olfactory receptor 10A4, Histone H2B type 2-F, Calmodulin, RNA-binding protein Raly, Phosphoinositide-3-kinase-interacting protein 1, Alpha-2-macroglobulin, Glycogen phosphorylase, brain form, THO complex subunit 4, Neuroblast differentiation-associated protein AHNAK, Phosphoserine aminotransferase, Mitochondrial folate transporter/carrier, Sentrin-specific protease 3, Cytosolic Fe—S cluster assembly factor NUBP2, Histone deacetylase 7, Serine/threonine-protein phosphatase 2A 55 kDa regulatory subunit B alpha isoform, Serine/threonine-protein phosphatase 2A regulatory subunit B” subunit alpha, Gelsolin, Insulin-like growth factor II, Tight junction protein ZO-1, Hsc70-interacting protein, FXYD domain-containing ion transport regulator 6, AP-1 complex subunit mu-1, Syntenin-1, NADH dehydrogenase [ubiquinone] iron-sulfur protein 7, mitochondrial, Low-density lipoprotein receptor, LIM domain transcription factor LMO4, Spectrin beta chain, non-erythrocytic 1, ATP-binding cassette sub-family A member 2, NADH dehydrogenase [ubiquinone] 1 subunit C2, SPARC-like protein 1, Electron transfer flavoprotein subunit alpha, mitochondrial, Glutamate dehydrogenase 1, mitochondrial, Complexin-2, Protein-serine O-palmitoleoyltransferase porcupine, Plexin domain-containing protein 2, Threonine synthase-like 2, Testican-2, C—X—C chemokine receptor type 1, Arachidonate 5-lipoxygenase-activating protein, Neuroguidin, Fatty acid 2-hydroxylase, Nuclear factor 1 X-type, LanC-like protein 1, Glutamine synthetase, Lysosome-associated membrane glycoprotein 1, Apolipoprotein A-I, Alpha-adducin, Guanine nucleotide-binding protein G(I)/G(S)/G(T) subunit beta-3, Integral membrane protein GPR137B, Ubiquilin-1, Aldose reductase, Clathrin light chain B, V-type proton ATPase subunit F, Apolipoprotein D, 40S ribosomal protein SA, Bcl-2-associated transcription factor 1, Phosphatidate cytidylyltransferase 2, ATP synthase-coupling factor 6, mitochondrial, Receptor tyrosine-protein kinase erbB-2, Echinoderm microtubule-associated protein-like 5, Phosphatidylethanolamine-binding protein 1, Myc box-dependent-interacting protein 1, Membrane-associated phosphatidylinositol transfer protein 1, 40S ribosomal protein S29, Small acidic protein, Galectin-3-binding protein, Fatty acid synthase, Baculoviral IAP repeat-containing protein 5, Septin-2, cAMP-dependent protein kinase type II-alpha regulatory subunit, Reelin, Apoptosis facilitator Bcl-2-like protein 14, Staphylococcal nuclease domain-containing protein 1, Methyl-CpG-binding domain protein 2, Transformation/transcription domain-associated protein, Transcription factor HES-1, Protein transport protein Sec23B, Paralemmin-2, C—C motif chemokine 15, Sodium/potassium-transporting ATPase subunit alpha-1, Stathmin, Heterogeneous nuclear ribonucleoprotein L-like, Nodal modulator 3, Interferon-induced GTP-binding protein Mx2, Integrin alpha-D, Low-density lipoprotein receptor-related protein 5-like protein, Macrophage migration inhibitory factor, Ferritin light chain, Dihydropyrimidinase-related protein 2, Neuronal membrane glycoprotein M6-b, ATP-binding cassette sub-family A member 5, Synaptosomal-associated protein 25, Insulin-like growth factor I, Ankyrin repeat domain-containing protein 29, Protein spinster homolog 3, Peflin, Contactin-1, Microfibril-associated glycoprotein 3, von Willebrand factor, Small nuclear ribonucleoprotein G, Interleukin-12 receptor subunit beta-1, Epoxide hydrolase 1, Cytochrome b-c1 complex subunit 10, Monoglyceride lipase, Serotransferrin, Alpha-synuclein, Cytosolic non-specific dipeptidase, Transgelin-2, Testisin, Fms-related tyrosine kinase 3 ligand, Noelin-2, Serine/threonine-protein kinase DCLK1, Interferon alpha-2, Acetylcholine receptor subunit beta, Histone H2A type 1, Beta-2 adrenergic receptor, Putrescine aminotransferase, Interferon alpha-1/13, Protein NEDD1, DnaJ homolog subfamily B member 1, Tubulin beta-6 chain, Non-histone chromosomal protein HMG-17, Polyprotein, Exosome component 10, Natural cytotoxicity triggering receptor 3 ligand 1, Gag polyprotein, Band 3 anion transport protein, Protease, Histidine-tRNA ligase, cytoplasmic, Collagen alpha-1(XVII) chain, Envoplakin, Histone H2B type 1-C/E/F/G/I, Diaminopimelate decarboxylase, Histone H2B type 2-E, Cytochrome P450 2D6, Dihydrolipoyllysine-residue succinyltransferase component of 2-oxoglutarate dehydrogenase complex, Histone H2B type 1-H, Thyroid peroxidase, Proline-rich transmembrane protein 2, Periplakin, Integrin alpha-6, Dystonin, Desmoplakin, Histone H2B type 1-J, Histone H2B type 1-B, 6,7-dimethyl-8-ribityllumazine synthase, Thyrotropin receptor, Integrin alpha-IIb, Nuclear pore membrane glycoprotein 210, Protein U2, DST protein, Plectin, Sll0397 protein, Bos d 10, Outer capsid protein VP4, 5,6-dihydroxyindole-2-carboxylic acid oxidase, O-phosphoseryl-tRNA(Sec) selenium transferase, ATP-dependent Clp protease proteolytic subunit, Lymphocyte activation gene 3 protein, Phosphoprotein 85, L1 protein, Actin, alpha skeletal muscle, Dihydrolipoyl dehydrogenase, Dihydrolipoyllysine-residue succinyltransferase component of 2-oxoglutarate dehydrogenase complex, mitochondrial, Liver carboxylesterase 1, Dihydrolipoyllysine-residue acetyltransferase component of pyruvate dehydrogenase complex, Acetyltransferase component of pyruvate dehydrogenase complex, Pyruvate dehydrogenase protein X component, mitochondrial, Dihydrolipoamide acetyltransferase, Protein disulfide-isomerase A3, Flotillin-2, Beta-galactosidase, TSHR protein, Lipoamide acyltransferase component of branched-chain alpha-keto acid dehydrogenase complex, mitochondrial, Nuclear autoantigen Sp-100, Desmoglein-1, Glucagon receptor, Membrane glycoprotein US8, Sodium/iodide cotransporter, ORF2, Capsid protein, Uncharacterized protein LF3, Formimidoyltransferase-cyclodeaminase, Core-capsid bridging protein, Neurovirulence factor ICP34.5, Probable RNA-binding protein, Cholesterol side-chain cleavage enzyme, mitochondrial, Histone H1.0, Non-histone chromosomal protein HMG-14, Histone H5, 60S acidic ribosomal protein P1, Pyruvate dehydrogenase E1 component subunit alpha, somatic form, mitochondrial, Leiomodin-1, Uncharacterized protein RP382, Uncharacterized protein U95, (Type IV) pilus assembly protein PilB, 2-succinylbenzoate-CoA ligase, TAZ protein, Tafazzin, Putative lactose-specific phosphotransferase system (PTS), IIBC component, Claudin-17, Pericentriolar material 1 protein, Yop proteins translocation protein L, Laminin subunit alpha-1, A disintegrin and metalloproteinase with thrombospondin motifs 13, Keratin, type I cytoskeletal 14, Coagulation factor VIII, Keratin, type I cytoskeletal 17, Neutrophil defensin 1, Ig alpha-1 chain C region, BRCA1-associated RING domain protein 1, Trinucleotide repeat-containing gene 6A protein, Thrombopoietin, Plasminogen-binding protein PgbA, Steroid 17-alpha-hydroxylase/17,20 lyase, Nucleolar RNA helicase 2, Histone H2B type 1-N, Steroid 21-hydroxylase, UreB, Melanin-concentrating hormone receptor 1, Blood group Rh(CE) polypeptide, HLA class II histocompatibility antigen, DP beta 1 chain, Platelet glycoprotein Ib alpha chain, Muscarinic acetylcholine receptor M1, Outer capsid glycoprotein VP7, Fibronectin, HLA class I histocompatibility antigen, B-8 alpha chain, AhpC, Cytoskeleton-associated protein 5, Sucrase-isomaltase, intestinal, Leukotriene B4 receptor 2, Glutathione peroxidase 2, Collagen alpha-1(VII) chain, Nucleosome assembly protein 1-like 4, Alanine-tRNA ligase, cytoplasmic, Extracellular calcium-sensing receptor, Major centromere autoantigen B, Large tegument protein deneddylase, Blood group Rh(D) polypeptide, Kininogen-1, Peroxiredoxin-2, Ezrin, DNA replication and repair protein RecF, Keratin, type II cytoskeletal 6C, Trigger factor, Serpin B5, Heat shock protein beta-1, Protein-arginine deiminase type-4, Potassium-transporting ATPase alpha chain 1, Potassium-transporting ATPase subunit beta, Forkhead box protein E3, Condensin-2 complex subunit D3, Myotonin-protein kinase, Zinc transporter 8, ABC transporter, substrate-binding protein, putative, Aquaporin-4, Cartilage intermediate layer protein 1, HLA class II histocompatibility antigen, DR beta 5 chain, Small nuclear ribonucleoprotein F, Small nuclear ribonucleoprotein E, Ig kappa chain V-V region L7, Ig heavy chain Mem5, Ig heavy chain V-III region J606, Hemoglobin subunit delta, Collagen alpha-1(XV) chain, 78 kDa glucose-regulated protein, 60S ribosomal protein L22, Alpha-1-acid glycoprotein 1, Malate dehydrogenase, mitochondrial, 60S ribosomal protein L8, Serine protease HTRA2, mitochondrial, 60S ribosomal protein L23a, Complement C3, Collagen alpha-1(XII) chain, Angiotensinogen, Protein S100-A9, Annexin A2, Alpha-actinin-4, HLA class II histocompatibility antigen, DQ alpha 1 chain, Apolipoprotein A-IV, Actin, aortic smooth muscle, HLA class II histocompatibility antigen, DP alpha 1 chain, Creatine kinase B-type, HLA class II histocompatibility antigen, DR beta 3 chain, Histone H1x, Heterogeneous nuclear ribonucleoprotein U-like protein 2, Basement membrane-specific heparan sulfate proteoglycan core protein, Cadherin-5, 40S ribosomal protein S13, Alpha-1-antitrypsin, Multimerin-2, Centromere protein F, 40S ribosomal protein S18, 40S ribosomal protein S25, Na(+)/H(+) exchange regulatory cofactor NHE-RF1, Actin, cytoplasmic 2, Hemoglobin subunit gamma-1, Hemoglobin subunit gamma-2, Protein NipSnap homolog 3A, Cathepsin D, 1-phosphatidylinositol 4,5-bisphosphate phosphodiesterase epsilon-1, 40S ribosomal protein S17, Apolipoprotein B-100, Histone H2B type 1-K, Collagen alpha-1(I) chain, Collagen alpha-2(I) chain, 3-hydroxyacyl-CoA dehydrogenase type-2, 60S ribosomal protein L27, Histone H1.2, Nidogen-2, Cadherin-1, 60S ribosomal protein L27a, HLA class II histocompatibility antigen, DR alpha chain, Dipeptidyl peptidase 1, Ubiquitin-40S ribosomal protein S27a, Citrate synthase, mitochondrial, Taxi-binding protein 1, Myeloperoxidase, Plexin domain-containing protein 1, Glycogen synthase, [Pyruvate dehydrogenase [acetyl-transferring]]-phosphatase 1, mitochondrial, Phorbol-12-myristate-13-acetate-induced protein 1, Peroxiredoxin-5, mitochondrial, 14-3-3 protein zeta/delta, ATP synthase subunit d, mitochondrial, Vitronectin, Lipopolysaccharide-binding protein, Ig heavy chain V-III region GAL, Protein CREG1, 60S ribosomal protein L6, Stabilin-1, Plasma protease C1 inhibitor, Ig kappa chain V-III region VG, Inter-alpha-trypsin inhibitor heavy chain H4, Alpha-1B-glycoprotein, Tartrate-resistant acid phosphatase type 5, Sulfhydryl oxidase 1, Complement component C6, Glycogen phosphorylase, muscle form, SH3 domain-binding glutamic acid-rich-like protein 3, Transforming protein RhoA, Albumin, isoform CRA_k, V-type proton ATPase subunit G 1, Flavin reductase (NADPH), Heat shock cognate 71 kDa protein, Lipoprotein lipase, Plasminogen, Annexin, Syntaxin-7, Transmembrane glycoprotein NMB, Coagulation factor XIII A chain, Apolipoprotein A-II, N-acetylglucosamine-6-sulfatase, Complement C1q subcomponent subunit B, Protein S100-A10, Microfibril-associated glycoprotein 4, 72 kDa type IV collagenase, Collagen alpha-1(XI) chain, Cathepsin B, Palmitoyl-protein thioesterase 1, Macrosialin, Histone H1.1, Histone H1.5, Fibromodulin, Thrombospondin-1, Rho GDP-dissociation inhibitor 2, Alpha-galactosidase A, Superoxide dismutase [Cu—Zn], HLA class I histocompatibility antigen, alpha chain E, Phosphatidylcholine-sterol acyltransferase, Legumain, Low affinity immunoglobulin gamma Fc region receptor II-c, Fructose-bisphosphate aldolase A, Cytochrome c oxidase subunit 8A, mitochondrial, Pyruvate kinase PKM, Endoglin, Target of Nesh-SH3, Cytochrome c oxidase subunit 5A, mitochondrial, EGF-containing fibulin-like extracellular matrix protein 2, Epididymal secretory protein E1, Cathepsin S, Annexin A5, Allograft inflammatory factor 1, Decorin, Complement Cis subcomponent, Low affinity immunoglobulin gamma Fc region receptor II-b, Leucine-rich alpha-2-glycoprotein, Lysosomal alpha-glucosidase, Disintegrin and metalloproteinase domain-containing protein 9, Transthyretin, Malate dehydrogenase, cytoplasmic, Filamin-A, Retinoic acid receptor responder protein 1, T-cell surface glycoprotein CD4, Procollagen-lysine, 2-oxoglutarate 5-dioxygenase 1, Fibrinogen gamma chain, Collagen alpha-2(V) chain, Cystatin-B, Lysosomal protective protein, Granulins, Collagen alpha-1(XIV) chain, C-reactive protein, Beta-1,4-galactosyltransferase 1, Prolow-density lipoprotein receptor-related protein 1, Ig heavy chain V-III region 23, Phosphoglycerate kinase 1, Alpha-2-antiplasmin, V-set and immunoglobulin domain-containing protein 4, Probable serine carboxypeptidase CPVL, NEDD8, Ganglioside GM2 activator, Clusterin, Alpha-2-HS-glycoprotein, HLA class I histocompatibility antigen, B-37 alpha chain, Adenosine deaminase CECR1, HLA class II histocompatibility antigen, DRB1-11 beta chain, Monocyte differentiation antigen CD14, Erythrocyte band 7 integral membrane protein, Profilin-1, E3 ubiquitin-protein ligase TRIM9, Tripartite motif-containing protein 67, TNF receptor-associated factor 1, Alpha-crystallin A chain, Mitotic checkpoint serine/threonine-protein kinase BUB1, TATA-binding protein-associated factor 2N, Cyclin-F, Centromere protein C, Apoptosis regulator Bcl-2, 2-oxoisovalerate dehydrogenase subunit beta, mitochondrial, Coilin, Nucleoplasmin-3, Homeobox protein Hox-A1, Serine/threonine-protein kinase Chk1, Mitotic checkpoint protein BUB3, Deoxyribonuclease-1, rRNA 2′-O-methyltransferase fibrillarin, Histone H1.3, DNA-directed RNA polymerase III subunit RPC1, DNA-directed RNA polymerase III subunit RPC2, Centromere-associated protein E, Kinesin-like protein KIF11, Histone H4-like protein type G, Tyrosine 3-monooxygenase, ABC transporter, permease/ATP-binding protein, Translation initiation factor IF-1, Protein FAN, Reticulon-4 receptor, Myeloid cell nuclear differentiation antigen, Glucose-6-phosphate isomerase, High affinity immunoglobulin gamma Fc receptor I, Tryptophan 5-hydroxylase 1, Tryptophan 5-hydroxylase 2, Secretory phospholipase A2 receptor, Aquaporin TIP4-1, Histone H2B type F—S, Histone H2AX, Histone H2A type 1-C, ATP-sensitive inward rectifier potassium channel 10, pVII, hypothetical protein TTV27_gp4, hypothetical protein TTV25_gp2, Alpha-1D adrenergic receptor, Alpha-1B adrenergic receptor, Packaging protein 3, hypothetical protein TTV14_gp2, KRR1 small subunit processome component homolog, Bestrophin-4, Alpha-2C adrenergic receptor, Uncharacterized ORF3 protein, Retinoic acid receptor beta, Retinoic acid receptor alpha, B-cell lymphoma 3 protein, Carbohydrate sulfotransferase 8, Harmonin, Prolactin-releasing peptide receptor, Sphingosine 1-phosphate receptor 1, Acyl-CoA-binding domain-containing protein 5, ORF1, hypothetical protein TTMV3_gp2, Mitochondrial import inner membrane translocase subunit Tim17-B, hypothetical protein TTV2_gp2, Absent in melanoma 1 protein, hypothetical protein TTV28_gp1, hypothetical protein TTV26_gp2, hypothetical protein TTV4_gp2, hypothetical protein TTV28_gp4, Mesencephalic astrocyte-derived neurotrophic factor, hypothetical protein TTMV7_gp2, hypothetical protein TTV19_gp2, pORF1, Pre-histone-like nucleoprotein, hypothetical protein TTV8_gp4, hypothetical protein TTV16_gp2, hypothetical protein TTV15_gp2, ORF2/4 protein, P2X purinoceptor 2, membrane glycoprotein E3 CR1-beta, D(2) dopamine receptor, Toll-like receptor 9, Phosphatidylcholine transfer protein, Transcription factor HIVEP2, Probable peptidylarginine deiminase, 60S ribosomal protein L9, Integrin beta-4, Keratin, type II cytoskeletal 1, Chromogranin-A, Histone H3.1t, Voltage-dependent L-type calcium channel subunit alpha-1D, Heat shock 70 kDa protein 1-like, ABC transporter related, UDP-N-acetylglucosamine pyrophosphorylase, Protein GREB1, Aldo/keto reductase, Component of the TOM (Translocase of outer membrane) complex, Excinuclease ABC C subunit domain protein, Phosphoenolpyruvate carboxylase, Arylacetamide deacetylase-like 4, Dynein heavy chain 10, axonemal, Putative Uracil-DNA glycosylase, Spore germination protein PE, Teneurin-1, Putative dehydrogenase, Polysaccharide biosynthesis protein, VCBS, Glutamate/aspartate transport system permease protein GltK, Noggin, Sclerostin, HLA class I histocompatibility antigen, A-30 alpha chain, HLA class I histocompatibility antigen, A-69 alpha chain, HLA class I histocompatibility antigen, B-15 alpha chain, Glutamate receptor ionotropic, NMDA 1, NarH, 40S ribosomal protein S21, Ceruloplasmin, 3-hydroxy-3-methylglutaryl-coenzyme A reductase, 60S ribosomal protein L30, HLA class II histocompatibility antigen gamma chain, HLA class I histocompatibility antigen, Cw-6 alpha chain, HLA class I histocompatibility antigen, Cw-16 alpha chain, Lysosomal alpha-mannosidase, Heat shock protein HSP 90-alpha, Histone H3.2, Histone H2A.J, Voltage-dependent T-type calcium channel subunit alpha-1G, Syncytin-1, Cathelicidin antimicrobial peptide, Tubulin beta-3 chain, Stress-70 protein, mitochondrial, Probable 1,4-alpha-glucan branching enzyme Rv3031, Nuclease-sensitive element-binding protein 1, Complement factor H-related protein 1, Glutaredoxin-1, Gamma-enolase, Platelet-derived growth factor receptor alpha, Collagen alpha-1(VIII) chain, Matrix metalloproteinase-25, Interferon regulatory factor 5, Cytochrome c oxidase subunit 7C, mitochondrial, Heat shock-related 70 kDa protein 2, Cysteine-rich protein 1, NADH dehydrogenase [ubiquinone] flavoprotein 2, mitochondrial, Glutathione S-transferase P, HLA class I histocompatibility antigen, A-68 alpha chain, HLA class II histocompatibility antigen, DM beta chain, Fructose-bisphosphate aldolase C, Beta-2-microglobulin, Cytochrome c oxidase subunit 5B, mitochondrial, Heat shock 70 kDa protein 13, ATP synthase protein 8, 60S ribosomal protein L13a, TRNA nucleotidyltransferase family enzyme, Ferredoxin-dependent glutamate synthase 2, Alkaline phosphatase, tissue-nonspecific isozyme, SLAM family member 5, Slit homolog 3 protein, Transforming growth factor-beta-induced protein ig-h3, Mannose-binding protein C, Calpain-1 catalytic subunit, Actin, gamma-enteric smooth muscle, Creatine kinase M-type, Protein THEM6, Histone-lysine N-methyltransferase ASH1L, C2 calcium-dependent domain-containing protein 4A, Ras association domain-containing protein 10, Hepatocyte cell adhesion molecule, ADAMTS-like protein 5, HLA class II histocompatibility antigen, DRB1-15 beta chain, Anoctamin-2, Phosphoglycerate mutase 1, Por secretion system protein porV (Pg27, lptO), Beta-enolase, Receptor antigen A, 3-oxoacyl-[acyl-carrier-protein] synthase 2, Putative heat shock protein HSP 90-beta 2, Radixin, Tubulin beta-1 chain, Vacuolar protein sorting-associated protein 26A, Serine/threonine-protein phosphatase 5, Catalase, Transketolase, Protein S100-A1, Alpha-centractin, Tubulin beta-4A chain, Beta-centractin, Probable phosphoglycerate mutase 4, Beta-actin-like protein 2, Tubulin beta-4B chain, Phosphoglycerate mutase 2, Alpha-internexin, Tubulin beta-2A chain, Dihydropyrimidinase-related protein 3, Putative heat shock protein HSP 90-beta-3, Fructose-bisphosphate aldolase B, Protein P, Endoplasmin, ATP synthase subunit 0, mitochondrial, Heat shock 70 kDa protein 6, Glyceraldehyde-3-phosphate dehydrogenase, testis-specific, Nascent polypeptide-associated complex subunit alpha-2, Carbonic anhydrase 2, Annexin A6, E3 ubiquitin-protein ligase RNF13, Myeloid-derived growth factor, Tyrosine-protein phosphatase non-receptor type substrate 1, Laminin subunit gamma-1, Trichohyalin, Thrombospondin-2, Sialoadhesin, GTPase IMAP family member 1, C4b-binding protein alpha chain, Voltage-dependent anion-selective channel protein 1, Hemopexin, Complement C5, FYVE, RhoGEF and PH domain-containing protein 2, Haptoglobin, Cytochrome P450 1B1, Titin, Myeloma-overexpressed gene 2 protein, Adipocyte enhancer-binding protein 1, Protein-glutamine gamma-glutamyltransferase 2, Protein Trim21, ADAMTS-like protein 3, N-alpha-acetyltransferase 16, NatA auxiliary subunit, Transforming growth factor beta-1, Elastin, Protein disulfide-isomerase AS, Plastin-2, Leukocyte immunoglobulin-like receptor subfamily B member 1, Histamine H2 receptor, Elongation factor 2, Caveolin-1, Ig gamma-2 chain C region, Immunoglobulin superfamily containing leucine-rich repeat protein, 40S ribosomal protein S9, Prolyl 4-hydroxylase subunit alpha-1, Endoplasmic reticulum-Golgi intermediate compartment protein 1, Tetranectin, Serine protease HTRA1, Heterogeneous nuclear ribonucleoprotein A1, Phosducin-like protein 3, Ig lambda chain V-VI region EB4, Fibronectin type III domain-containing protein 1, Keratin, type II cytoskeletal 2 epidermal, Ferritin heavy chain, Y-box-binding protein 3, Complement C4-B, HLA class I histocompatibility antigen, Cw-15 alpha chain, HLA class I histocompatibility antigen, B-42 alpha chain, Collagen alpha-i(V) chain, HLA class I histocompatibility antigen, B-73 alpha chain, Integral membrane protein 2B, Lysosome-associated membrane glycoprotein 3, Proteoglycan 4, Ribosomal protein S6 kinase alpha-6, Metalloproteinase inhibitor 2, HLA class II histocompatibility antigen, DRB1-12 beta chain, ATP-sensitive inward rectifier potassium channel 15, Vitamin D-binding protein, Osteopontin, Deoxynucleotidyltransferase terminal-interacting protein 2, Olfactory receptor 5K4, Myosin light chain kinase 2, skeletal/cardiac muscle, Non-POU domain-containing octamer-binding protein, Ubiquilin-2, HLA class I histocompatibility antigen, B-51 alpha chain, Minor histocompatibility antigen H13, Glycophorin-C, Eosinophil cationic protein, SWI/SNF complex subunit SMARCC2, Macrophage mannose receptor 1, tRNA-splicing ligase RtcB homolog, Reticulocalbin-2, Heterogeneous nuclear ribonucleoprotein L, 40S ribosomal protein S30, Collagen alpha-3(VI) chain, Matrix metalloproteinase-14, Antithrombin-III, 60S ribosomal protein L10a, Retinol-binding protein 4, Heterogeneous nuclear ribonucleoprotein R, Lithostathine-1-alpha, Ret finger protein-like 2, Zinc-alpha-2-glycoprotein, Carboxypeptidase Q, HLA class I histocompatibility antigen, B-56 alpha chain, Chondroadherin, Cysteine-rich protein 2, Prosaposin, Complement component C9, Apolipoprotein C-II, Protocadherin-16, Leukocyte immunoglobulin-like receptor subfamily B member 4, Galactokinase, Complement factor H, Uncharacterized protein YEL014C, Glycerophosphocholine phosphodiesterase GPCPD1, Echinoderm microtubule-associated protein-like 6, or an isoform, homolog, fragment, variant or derivative of any of these proteins.

[0244] The term “alloantigen” (also referred to as “allogeneic antigen” or “isoantigen”) refers to an antigen existing in alternative (allelic) forms in a species, and can therefore induce alloimmunity (or isoimmunity) in members of the same species, e.g. upon blood transfusion, tissue or organ transplantation, or sometimes pregnancy. Typical allogeneic antigens include histocompatibility antigens and blood group antigens. In the context of the present invention, alloantigens are preferably of human origin. Artificial nucleic acid (RNA) molecules encoding antigenic (poly-)peptides or proteins derived from alloantigens can, for instance, be used to induce immune tolerance towards said alloantigen.

[0245] Exemplary allogeneic antigens in the context of the present invention include, without limitation, allogeneic antigens derived or selected from UDP-glucuronosyltransferase 2B17 precursor, MHC class I antigen HLA-A2, Coagulation factor VIII precursor, coagulation factor VIII, Thrombopoietin precursor (Megakaryocyte colony-stimulating factor) (Myeloproliferative leukemia virus oncogene ligand) (C-mpl ligand) (ML) (Megakaryocyte growth and development factor) (MGDF), Integrin beta-3, histocompatibility (minor) HA-1, SMCY, thymosin beta-4, Y-chromosomal, Histone demethylase UTY, HLA class II histocompatibility antigen, DP(W2) beta chain, lysine-specific demethylase 5D isoform 1, myosin-Ig, Probable ubiquitin carboxyl-terminal hydrolase FAF-Y, Pro-cathepsin H, DRB1, MHC DR beta DRw13 variant, HLA class II histocompatibility antigen, DRB1-15 beta chain, HLA class II histocompatibility antigen, DRB1-1 beta chain precursor, Minor histocompatibility protein HMSD variant form, HLA-DR3, Chain B, Hla-Dr1 (Dra, Drb1 0101) Human Class Ii Histocompatibility Protein (Extracellular Domain) Complexed With Endogenous Peptide, MHC classII HLA-DRB1, MHC class I HLA-A, human leukocyte antigen B, RAS protein activator like-3, anoctamin-9, ATP-dependent RNA helicase DDX3Y, Protocadherin-11 Y-linked, KIAA0020, platelet glycoprotein IIIa leucine-33 form-specific antibody light chain variable region, dead box, Y isoform, ATP-dependent RNA helicase DDX3X isoform 2, HLA-DRB1 protein, truncated integrin beta 3, glycoprotein IIIa, platelet membrane glycoprotein IIb, Carbonic anhydrase 1, HLA class I histocompatibility antigen, A-11 alpha chain precursor, HLA-A11 antigen A11.2, HLA class I histocompatibility antigen, A-68 alpha chain, MHC HLA-B51, MHC class I antigen HLA-A30, HLA class I histocompatibility antigen, A-1 alpha chain precursor variant, HLA class I histocompatibility antigen B-57, MHC class I antigen, MHC class II antigen, MHC HLA-DR-beta cell surface glycoprotein, DR7 beta-chain glycoprotein, MHC DR-beta, lymphocyte antigen, collagen type V alpha 1, collagen alpha-2(V) chain preproprotein, sp110 nuclear body protein isoform d, integrin, alpha 2b (platelet glycoprotein IIb of IIb/IIIa complex, antigen CD41), isoform CRA_c, 40S ribosomal protein S4, Y isoform 1, uncharacterized protein KIAA1551, factor VIII, UDP-glucuronosyltransferase 2B17, HLA class I histocompatibility antigen, A-2 alpha chain, Thrombopoietin, Minor histocompatibility protein HA-1, Lysine-specific demethylase 5D, HLA class II histocompatibility antigen, DP beta 1 chain, Unconventional myosin-Ig, HLA class II histocompatibility antigen, DRB1-13 beta chain, HLA class II histocompatibility antigen, DRB1-1 beta chain, HLA class II histocompatibility antigen, DRB1-3 chain, HLA class I histocompatibility antigen, B-46 alpha chain, Pumilio homolog 3, ATP-dependent RNA helicase DDX3X, Integrin alpha-IIb, HLA class I histocompatibility antigen, A-11 alpha chain, HLA class I histocompatibility antigen, B-51 alpha chain, HLA class I histocompatibility antigen, A-30 alpha chain, HLA class I histocompatibility antigen, A-1 alpha chain, HLA class I histocompatibility antigen, B-57 alpha chain, HLA class I histocompatibility antigen, B-40 alpha chain, HLA class II histocompatibility antigen, DRB1-7 beta chain, HLA class II histocompatibility antigen, DRB1-12 beta chain, Collagen alpha-1(V) chain, Collagen alpha-2(V) chain, Sp110 nuclear body protein, or an isoform, homolog, fragment, variant or derivative of any of these proteins.

### Allergenic (Poly-)Peptides or Proteins

[0246] The at least one coding region of the artificial nucleic acid molecule of the invention may encode at least one “allergenic (poly-)peptide or protein”. The term “allergenic (poly-)peptide or protein” or “allergen” refers to (poly-)peptides or proteins capable of inducing an allergic reaction, i.e. a pathological immunological reaction characterized by an altered bodily reactivity (such as hypersensitivity), upon exposure to a subject. Typically, “allergens” are implicated in “atopy”, i.e. adverse immunological reactions involving immunoglobulin E (IgE). The term “allergen” thus typically means a substance (here: a (poly-)peptide or protein) that is involved in atopy and induces IgE antibodies. Typical allergens envisaged herein include proteinaceous Crustacea-derived allergens, insect-derived allergens, mammalian allergens, mollusk-derived allergens, plant allergens and fungal allergens.

[0247] Exemplary allergens in the context of the present invention include, without limitation, allergens derived or selected from from Allergen Pen n 18, Antigen Name, Ara h 2.01 allergen, Melanoma antigen recognized by T-cells 1, Non-specific lipid-transfer protein precursor (LTP) (Allergen Mal d 3), ovalbumin, Parvalbumin beta, Pollen allergen Lol p VA precursor, Pollen allergen Phl p 5b precursor, pru p 1, Pollen allergen Phl p 5a, Der p 1 allergen precursor, Pollen allergen KBG 60 precursor, major allergen Tur c1—Turbo cornutus, Mite group 2 allergen Lep d 2 precursor, Lep D 2 precursor, Major latex allergen Hev b 5, major allergen Cor a 1.0401, Major pollen allergen Art v 1 precursor, Major pollen allergen Bet v 1-A, Beta-lactoglobulin precursor, Alpha-amylase inhibitor 0.28 precursor (CIII) (WMAI-1), group V allergen Phl p 5.0203 precursor, Polygalacturonase precursor, pollen allergen Phl pI, Der f 2 allergen, Probable non-specific lipid-transfer protein 2 precursor, Venom allergen 5 precursor, Pollen allergen Phl p 1 precursor, group V allergen, Chain A, Crystal Structure Of The Calcium-Binding Pollen Allergen Phl P 7 (Polcalcin) At 1.75 Angstroem, Tri r 2 allergen, Pathogenesis-related protein precursor, Globin CTT-III precursor, Major allergen Alt a 1, 13S globulin seed storage protein 3 precursor (Legumin-like protein 3) (Allergen Fag e 1), Lit v 1 tropomyosin, Rubber elongation factor protein, Ovomucoid precursor, Small rubber particle protein, Mag3, Allergen Ara h 1, clone P41B precursor, 13S globulin seed storage protein 1 precursor (Legumin-like protein 1), Pollen allergen Lol p 1 precursor, Major pollen allergen Jun a 1 precursor, Sugi basic protein precursor, profilin, Globin CTT-IV precursor, alkaline serine protease, Glycinin, Conglutin-7 precursor, 2S protein 1, Globin CTT-VI precursor, Ribonuclease mitogillin precursor, Major pollen allergen Cyn d 1, Melanocyte-stimulating hormone receptor, P34 probable thiol protease precursor, Vicilin-like protein, Major allergen Equ c 1 precursor, major allergen Bet v 1, Major allergen Can f 1 precursor, Bd 30K (34 kDa maturing seed protein), Major pollen allergen, Major pollen allergen Hol I 1 precursor, Kappa-casein precursor, major allergen Dau c 1/1, Stress-induced protein SAM22, Major allergen Api g 1, Glycinin G2 precursor, allergen Arah3/Arah4, Der f 1 allergen, Peptidase 1 precursor (Mite group 1 allergen Eur m 1) (Allergen Eur m I), Oryzin precursor, alpha S1 casein, Major pollen allergen Cha o 1 precursor, Non-specific lipid-transfer protein 1, collagen, type I, alpha 2, Der P 1, Peptidase 1 precursor (Major mite fecal allergen Der p 1) (Allergen Der p I), pollen allergen Bet v 1, Phospholipase A2 precursor, Mite group 2 allergen Der p 2, Allergen Mag, Major urinary protein precursor, Major allergen I polypeptide chain 2 precursor, Pen a 1 allergen, Fag e 1, Serum albumin precursor, Pollen allergen Amb a 3, putative alpha-amylase inhibitor 0.28, Albumin seed storage protein, 2S sulfur-rich seed storage protein precursor (Allergen Ber e 1), seed storage protein SSP2, Pro-hevein precursor, pollen allergen, Der p 2 allergen precursor, 2S seed storage protein 1 precursor, prohevein, 2s albumin, major allergen I, polypeptide chain 1, Major allergen I polypeptide chain 1 precursor, Cry j IB precursor, Mite group 2 allergen Der f 2 precursor, beta-casein precursor, Lep D 2 allergen precursor, Allergen Cry j 2 (Pollen allergen), KIAA1224 protein, Hydrophobic seed protein, Allergen Bos d 2 precursor, Allergen II, Mite group 2 allergen Der p 2 precursor, Mite allergen Blo t 5, Peptidase 1 precursor (Major mite fecal allergen Der f 1) (Allergen Der f I), Par j, Can f I, Pollen allergen Lol p 2-A (Lol p II-A), Paramyosin, Alpha-S2-casein precursor, P34 probable thiol protease, beta-lactoglobulin, major allergen Phl p 5, Chain A, Structure Of Erythrocruorin In Different Ligand States Refined At 1.4 Angstroms Resolution, Globin CTT-VIII, Major allergen Asp f 2 precursor, tropomyosin, core protein [Hepatitis B virus], Omega gliadin storage protein, Alpha/beta-gliadin A-V, group 14 allergen protein, Pollen allergen Amb a 1.1 precursor, Glycinin G1 precursor, Pollen allergen Amb a 2 precursor, Cry j 1 precursor, allergen Ziz m 1, Glycine-rich cell wall structural protein 1.8 precursor, Putative pectate lyase 17 precursor, pectate lyase, Pectate lyase precursor, Probable pectate lyase 18 precursor, major allergen beta-lactoglobulin, Major allergen Mal d 1, Alpha-S1-casein precursor, 2S seed storage protein 1, plectrovirus spv1-r8a2b orf 14 transmembrane protein, allergen I/a, Allergen Cr-PI, Probable non-specific lipid-transfer protein 1, Cr-PII allergen, melanoma antigen gp100, Alpha-lactalbumin precursor, Chain A, Anomalous Substructure Of Alpha-Lactalbumin, Pilosulin-1 precursor (Major allergen Myr p 1) (Myr p I), Pollen allergen Lol p 3 (Lol p III), Lipocalin 1 (tear prealbumin), Major pollen allergen Cup a 1, Melanocyte protein Pmel 17 precursor, major house dust allergen, Non-specific lipid-transfer protein 1 (LTP 1) (Major allergen Pru d 3), Non-specific lipid-transfer protein 1 (LTP 1) (Major allergen Pru ar 3), Pollen allergen Lol p 1, alpha-gliadin, Cr-PII, albumin, Alpha-S1-casein, major allergen I, Ribonuclease mitogillin, beta-casein, UA3-recognized allergen, 2S sulfur-rich seed storage protein 1, unnamed protein product, Polygalacturonase, Major allergen Pru av 1, Der p 1 allergen, lyase allergen, Major pollen allergen Bet v 1-F/I, Gamma-gliadin precursor, 5-hydroxytryptamine receptor 2C (5-HT-2C) (Serotonin receptor 2C) (5-HT2C) (5-HTR2C) (5HT-1C), omega-5 gliadin, Enolase 1 (2-phosphoglycerate dehydratase) (2-phospho-D-glycerate hydro-lyase), Probable non-specific lipid-transfer protein, Allergen Sin a 1, Glutenin, low molecular weight subunit precursor, Major Peanut Allergen Ara H 1, mal d 3, Eukaryotic translation initiation factor 3 subunit D, tyrosinase-related protein-2, PC4 and SFRS1-interacting protein, RAD51-like 1 isoform 1, Antimicrobial peptide 2, Proteasome subunit alpha type-3, Neurofilament heavy polypeptide (NF—H) (Neurofilament triplet H protein) (200 kDa neurofilament protein), Superoxide dismutase, Major pollen allergen Cor a 1 isoforms 5, 6, 11 and 16, cherry-allergen PRUA1, Allergen Asp f 4 precursor, Chain A, Tertiary Structure Of The Major House Dust Mite Allergen Der P 2, Nmr, 10 Structures, RNA-binding protein NOB1, Dermatan-sulfate epimerase precursor, Squamous cell carcinoma antigen recognized by T-cells 3, Peptidyl-prolyl cis-trans isomerase B precursor, Probable glycosidase crf1, Chain A, Birch Pollen Profilin, Profilin-1, avenin precursor (clone pAv122)—oat, gamma 3 avenin, coeliac immunoreactive protein 2, CIP-2, prolamin 2 {N-terminal}, avenin gamma-3—small naked oat (fragment), major pollen allergen Ole e 1, Cytochrome P450 3A1, Ole e 1 protein, Ole e 1.0102 protein, Der f 2, GroEL-like chaperonin, major allergen Arah1, manganese superoxide dismutase, beta-1,3-glucanase-like protein, Ara h 1 allergen, Major allergen Alt a 1 precursor, Bla g 4 allergen, Per a 4 allergen variant 1, Lyc e 2.0101, pectate lyase 2, allergen, hypothetical protein, Probable pectate lyase P59, Pollen allergen Amb a 1.4, Patatin-2-Kuras 1, calcium-binding protein, vicilin seed storage protein, major allergenic protein Mal f4, pel protein, ripening-related pectate lyase, pectate lyase/Amb allergen, Bet v 4, Polcalcin Bet v 4, Mite allergen Der f 6, Allergen Alt a 2, Extracellular elastinolytic metalloproteinase, pectate lyase-like protein, Pectate lyase E, Profilin-2, Venom allergen 5, Cucumisin, Putative peroxiredoxin, putative pectate lyase precursor, Serum albumin, pollen allergen Phl p 11, serine (or cysteine) proteinase inhibitor, clade B (ovalbumin), member 3, Allergen Bla g 4 precursor (Bla g IV), Allergen Pen n 13, Hyaluronidase A, pectate lyase homolog, putative allergen Cup a 1, Major pollen allergen Jun v 1, putative allergen jun o 1, Pollen allergen Amb a 1.2, Probable pectate lyase 13, P8 protein, Cytochrome c, Glucan endo-1,3-beta-glucosidase, basic vacuolar isoform, 13S globulin, beta-1,3-glucanase, beta-1, 3-glucananse, Glutenin, high molecular weight subunit DX5 precursor, X-type HMW glutenin, Glutenin, high molecular weight subunit DX5, high-molecular-weight glutenin subunit 1Dx2.1, high molecular weight glutenin subunit, 11S globulin-like protein, seed storage protein, alpha-L-Fucp-(1->3)-[alpha-D-Manp-(1->6)-[beta-D-Xylp-(1->2)]-beta-D-Manp-(1->4)-beta-D-GcpNAc-(1->4)]-D-GlcpNAc, beta casein B, type 1 non-specific lipid transfer protein precursor, Fas AMA, Caspase-8 precursor, H antigen glycoprotein, H antigen gl, Heat shock protein HSP 90-beta, dihydrolipoamide S-acetyltransferase (E2 component of pyruvate dehydrogenase complex), isoform CRA_a, Group V allergen Phl p 5.0103 precursor, Phl p6 allergen precursor, Group V allergen Phl p 5, Major pollen allergen Phl p 4 precursor, Pollen allergen Phl p V, Phl p 3 allergen, Pollen allergen Phl pI precursor, Chain A, Crystal Structure Of Phl P 1, A Major Timothy Grass Pollen Allergen, Pollen allergen Phl p 4, Profilin-3, Profilin-2/4, Pollen allergen Phl p 2, Phl p6 IgE binding fragment, Phlp5, Chain N, Crystal Structure Of Phl P 6, A Major Timothy Grass Pollen Allergen Co-Crystallized With Zinc, group V allergen Phl p 5.0206 precursor, allergenic protein, Major allergen Ani s 1, allergen Ana o 2, ENSP-like protein, BW 16 kDa allergen, alpha2(I) collagen, collagen a2(I), type 1 collagen alpha 2, Cyn d 1, Major pollen allergen Aln g 1 (Allergen Aln g I), allergen Len c 1.0101, galactomannan, Aspartic protease Bla g 2, alcohol dehydrogenase, lipid transfer protein precursor, alpha/beta gliadin precursor, Der f 7 allergen, Der p 7 allergen polypeptide, non-specific lipid transfer protein, Major allergen I polypeptide chain 1, prunin 1 precursor, prunin 2 precursor, 11S legumin protein, Ara h 7 allergen precursor, vicilin-like protein precursor, allergen Arah6, parvalbumin like 2, parvalbumin like 1, casein kappa, Ribosomal biogenesis protein LAS1L, Pen c 1, SchS21 protein, Inactive hyaluronidase B, Mup1 protein, Macrophage migration inhibitory factor, Eukaryotic translation initiation factor 2 subunit 3, CR2/CD21/C3d/Epstein-Barr virus receptor precursor, DNA topoisomerase 2-alpha, pollen allergen Cyn d 23, major allergen Bla g 1.02, pectin methylesterase allergenic protein, major allergen Pha a 5 isoform, 2S albumin seed storage protein, aldehyde dehydrogenase (NAD+), pollen allergen Poa p 5, Bla g 1.02 variant allergen, partial, Major pollen allergen Lol p 5b, allergen Bla g 6.0301, protein disulfide isomerase, putative mannitol dehydrogenase, pollen allergen Lol p 4, Aspartic protease pep1, enolase, IgE-binding protein, Minor allergen Alt a 5, HDM allergen, Chain A, Crystal Structure Of An Mbp-Der P 7 Fusion Protein, allergen Bla g 6.0201, major allergen Bla g 1.0101, alpha-amylase, minor allergen, ribosomal protein P2, metalloprotease (MEP), autophagic serine protease Alp2, allergenic isoflavone reductase-like protein Bet v 6.0102, Chain A, Crystal Structure Of The Complex Of Antibody And The Allergen Bla G 2, minor allergen, thioredoxin TrxA, enolase, allergen Cla h 6, glutathione-S-transferase, molecular chaperone and allergen Mod-E/Hsp90/Hsp1, major allergen Asp F2, Mite allergen Der p 3, Chain B, Crystal Structure Of Aspergillus Fumigatus Mnsod, Glutathione S-transferase (GST class-sigma) (Major allergen Bla g 5), Minor allergen Cla h 7, unknown protein, allergenic cerato-platanin Asp F13, art v 2 allergen, Polcalcin Aln g 4, major allergen and cytotoxin AspF1, pollen allergen Que a 1 isoform, trypsin-like serine protease, Mite group 6 allergen Der p 6, allergen Asp F7, cell wall protein PhiA, 60 kDa allergen Der f 18p, hsp70, Sal k 3 pollen allergen, acidic ribosomal protein P2, Chain B, Crystal Structure Of The Nadp-Dependent Mannitol Dehydrogenase From Cladosporium herbarum., Art v 3.0301 allergen precursor, 60S ribosomal protein L3, Der p 20 allergen, Pollen allergen Sal k 1, Per a 6 allergen, gelsolin-like allergen Der f 16, Chain A, Structural Characterization Of The Tetrameric Form Of The Major Cat Allergen Fel D 1, Glutathione S-transferase, Fel d 4 allergen, Major pollen allergen Dac g 4, Group I allergen Ant o I (Form 1), pollen, allergen Bla g 6.0101, cystatin, Mite allergen Der p 5, allergen Fra e 1, allergen Asp F4, major antigen-like protein, PR5 allergen Cup s 3.1 precursor, heat shock protein, allergen precursor, arginine esterase precursor, Sal k 4 pollen allergen, 60S acidic ribosomal protein P1, pollen allergen Jun o 4, Polcalcin Cyn d 7, group I pollen allergen, peptidyl-prolyl cis-trans isomerase/cyclophilin, putative, profilin 2, pollen allergen Cyn d 15, Der f 13 allergen, Can f 2, peroxisomal-like protein, peptidylprolyl isomerase (cyclophilin), MHC class II antigen, BETV4 protein, Major pollen allergen Pla l 1, peptidase, MPA3 allergen, plantain pollen major allergen, Pla l 1.0103, major allergen Bla g 1.0101, partial, Pollen allergen Amb p 5a, Der f 16 allergen, Pollen allergen Dac g 2, IgE-binding protein C-terminal fragment (148 AA), Pollen allergen Dac g 3, PPIase, rAsp f 9, Mite allergen Der p 7, thioredoxin, hydrolase, Major pollen allergen Pha a 1, Der p 13 allergen, Chain B, X-Ray Structure Of Der P 2, The Major House Dust Mite Allergen, oleosin 3, Peptidyl-prolyl cis-trans isomerase, Chain A, Crystal Structure Of A Major House Dust Mite Allergen, Derf 2, Chain A, Crystal Structure Of Major Allergens, Bla G 4 From Cockroaches, Amb a 1-like protein, D-type LMW glutenin subunit, Glutathione S-transferase 2, acidic Cyn d 1 isoallergen isoform 4 precursor, albumin seed storage protein precursor, tyrosine 3-monooxygenase isoform b, N-glycoprotein, FAD-linked oxidoreductase BG60, Blo t 21 allergen, Ubiquitin D, Nucleoporin Nup37, Non-POU domain-containing octamer-binding protein, Transcription elongation factor SPT5, Major allergen Mal d 1 (Ypr10 protein), Serpin-Z2B, Pas n 1 allergen precursor, arginine kinase, Lit v 3 allergen myosin light chain, sarcoplasmic calcium-binding protein, alpha subunit of beta conglycinin, prunin, allergen Cry j 2, Plexin-A4, Non-specific lipid-transfer protein, Low molecular weight glutenin subunit precursor, gamma-gliadin, friend of GATA-1, Wilms tumor protein, Ubiquitin-conjugating enzyme E2 C, Fatty acid synthase, Histone H4, Fructose-bisphosphate aldolase A, oxidoreductase, lactoglobulin beta, immunoglobulin gamma 3 heavy chain constant region, Phlp5 precursor, dust mite allergen precursor, heat shock protein 70, Major allergen I polypeptide chain 2, alpha-lactalbumin precursor protein, 30 kDa pollen allergen, group 5 allergen precursor, group 1 allergen Dac g 1.01 precursor, uncharacterized protein, unknown Timothy grass protein, kappa-casein, alpha-S1 casein, SXP/RAL-2 family protein, Lipocalin-1 precursor, alpha purothionin, major allergen Bet v 1.01A, P2 protein, Osmotin, Major Peanut Allergen Ara H 2, Der f 3 allergen, Conglutin, Ara h 6 allergen, Cathelicidin antimicrobial peptide, cholinesterase, Per a 2 allergen, Submaxillary gland androgen-regulated protein 3B, chitinase, partial, allergen Can f 4 precursor, Can f 4 variant allergen precursor, nascent polypeptide-associated complex subunit alpha-2, Polcalcin Phl p 7 (Calcium-binding pollen allergen Phl p 7) (P7), Der p II allergen, main allergen Ara h1, allergen Ara h 2.02, fatty acid binding protein, glutamate receptor, glycinin A3B4 subunit, profilin isoallergen 2, Pollen allergen Amb p 5b, calcium-binding protein isoallergen 2, calcium-binding protein isoallergen 1, cysteine protease, profilin isoallergen 1, ragweed homologue of Art v 1 precursor, Amb p 5, ragweed homologue of Art v 1 (isoform 1), partial, antigen E, putative pectate lyase precursor, partial, Pollen allergen Amb a 5, Amb p V allergen, hemocyanin subunit 6, major pollen allergen Cha o 2, trichohyalin, aspartyl endopeptidase, NCRA10, allergen bla g 8, vitellogenin, NCRA3, NCRA4, allergen Bla g 3 isoform 2 precursor, partial, NCRA2, NCRA13, NCRA8, NCRA1, Bla g 11, receptor for activated protein kinase C-like, NCRA5, NCRA14, triosephosphate isomerase, NCRA12, NCRA7, NCRA11, trypsin, triosephosphate isomerase, partial, NCRA6, structural protein, NCRA15, NCRA9, NCRA16, Der f 4 allergen, Der f 5 allergen, Phl p6 allergen, Der f Gal d 2 allergen, Derp_19830, glucosylceramidase, carboxypeptidase, Der f 8 allergen, partial, fructose bisphosphate aldolase, ATP synthase, Der f Alt a 10 allergen, glutamine synthetase, Derp_c23425, myosin, Der f 8 allergen, LytFM, Der f 11 allergen, serine protease, glutathione transferase mu, triose-phosphate isomerase, ubiquinol-cytochrome c reductase binding protein-like protein, ferritin, isomerase, filamin C, Der p 5, Mag44, partial, venom, muscle specific protein, Der f 5.02 allergen, Mag44, Derp_c21462, group 18 allergen protein, Derf_c9409, napin-type 2S albumin 1 precursor, napin-type 2S albumin 3, isoflavone reductase-like protein CJP-6, Pectate lyase 1, allergen Cry j 2, partial, Major allergen Dau c 1, Filamin-C, putative, Pis v 5.0101 allergen 11S globulin precursor, Pis v 5, 48-kDa glycoprotein precursor, vicilin, or a homolog, fragment, variant or derivative of any of these allergens.

### Reporter Proteins

[0248] The at least one coding region of the artificial nucleic acid (RNA) molecule of the invention may encode at least one “reporter (poly-)peptide or protein”.

[0249] The term “reporter (poly-)peptide or protein” refers to a (poly-)peptide or protein that is expressed from a reporter gene. Reporter (poly-)peptides or proteins are typically heterologous to the expression system used. Their presence and/or functionality can be preferably readily detected, visualized and/or measured (e.g. by fluorescence, spectroscopy, luminometry, etc.).

[0250] Exemplary reporter (poly-)peptides or proteins include beta-galactosidase (encoded by the bacterial gene IacZ); luciferase; chloramphenyl acetyltransferase (CAT); GUS (beta-glucuronidase); alkaline phosphatase; green fluorescent protein (GFP) and its variants and derivatives, such as enhanced Green Fluorescent Proteins (eGFP), CFP, YFP, GFP+; alkaline phosphatase or secreted alkaline phosphatase; peroxidase, beta-xylosidase; XylE (catechol dioxygenase); TreA (trehalase); Discosoma sp. red fluorescent protein (dsRED) and its variants and derivatives, such as mCherry; HcRed; AmCyan; ZsGreen; ZsYellow; AsRed; and other bioluminescent and fluorescent proteins. The term “luciferase” refers to a class of oxidative enzymes that are capable of producing bioluminescence. Many luciferases are known in the art, for example firefly luciferase (for example from the firefly Photinus pyralis), Renilla luciferase (Renilla reniformis), Metridia luciferase (MetLuc, derived from the marine copepod Metridia longa), Aequorea luciferase, Dinoflagellate luciferase, or Gaussia luciferase (Gluc) or an isoform, homolog, fragment, variant or derivative of any of these proteins.

### Additional Domains, Tags, Linkers, Sequences or Elements

[0251] The at least one coding region of the inventive artificial nucleic acid molecule may encode, preferably in addition to the at least one (poly-)peptide or protein of interest, further (poly-)peptide domains, tags, linkers, sequences or elements. It is envisioned that the nucleic acid sequences encoding said additional domains, tags, linkers, sequences or elements are operably linked in frame to the region encoding the (poly-)peptide or protein of interest, such that expression of the coding sequence preferably yields a fusion product (or: derivative) of the (poly-)peptide or protein of interest coupled to the additional domain(s), tag(s), linker(s), sequence(s) or element(s).

[0252] For example, the nucleic acid sequences encoding further (poly-)peptide domains, tags, linkers, sequences or elements is preferably in-frame with the nucleic acid sequence encoding the (poly-)peptide or protein of interest. Codon usage may be adapted to the host envisaged for expressing the artificial nucleic acid (RNA) molecule of the invention.

[0253] Preferably, the at least one coding region of the artificial nucleic acid molecule of the invention may further encode at least one (a) effector domain; (b) peptide or protein tag; (c) localization signal or sequence; (d) nuclear localization signal (NLS); (e) signal peptide; (f) peptide linker; (g) secretory signal peptide (SSP), (h) multimerization element including dimerization, trimerization, tetramerization or oligomerization elements; (i) virus like particle (VLP) forming element; (j) transmembrane element; (k) dendritic cell targeting element; (l) immunological adjuvant element; (m) element promoting antigen presentation; (n) 2A peptide; (o) element that extends protein half-life; and/or (p) element for post-translational modification (e.g. glycosylation).

### Effector Domains

[0254] The term “effector domain” refers to (poly-)peptides or protein domains conferring biological effector functions, typically by interacting with a target, e.g. enzymatic activity, target (e.g. ligand, receptor, protein, nucleic acid, hormone, neurotransmitter small organic molecule) binding, signal transduction, immunostimulation, and the like.

[0255] Effector domains may suitably be (additionally) encoded by artificial nucleic acid (RNA) molecules encoding any (poly-)peptide or protein of interest as disclosed herein. Effector domains fused to or inserted into (poly-)peptides or proteins of interest may advantageously impart an additional biological function or activity on said (poly-)peptide or protein. When encoded in combination with a (poly-)peptide or protein of interest, effector domains may be placed at at the N-terminus, C-terminus and/or within of the (poly-)peptide or protein of interest, or combinations thereof. Different effector domains may be combined. On nucleic acid level, the coding sequence for such effector domain is typically placed in frame (i.e. in the same reading frame), 3′ to, 5′ to or within the coding sequence for the (poly-)peptide or protein of interest, or combinations thereof.

### Peptide or Protein Tag

[0256] “Peptide or protein tags” are short amino acid sequences introduced into (poly-)peptides or proteins of interest to confer a desired biological functionality or property. Typically, “peptide tags” may be used for detection, purification, separation or the addition of certain desired biological properties or functionalities.

[0257] Peptide or protein tags may thus be deployed for different purposes. Almost all peptide tags can be used to enable detection of a (poly-)peptide or protein of interest through Western blot, ELISA, ChIP, immunocytochemistry, immunohistochemistry, and fluorescence measurement. Most protein or peptide tags can be utilized for purification of (poly-)peptides or proteins of interest. Some tags can be explored to extend the biological protein half-lives or increasing solubility of (poly-)peptides and proteins of interest, or help to localize a (poly-)peptide or protein to a cellular compartment.

[0258] Protein or peptide tags may suitably be (additionally) encoded by artificial nucleic acid (RNA) molecules encoding any (poly-)peptide or protein of interest as disclosed herein. Protein or peptide tags fused to or inserted into (poly-)peptides or proteins of interest may advantageously enable, e.g., the detection, purification or separation of said (poly-)peptide or protein. When encoded in combination with a (poly-)peptide or protein of interest, protein or peptide tags may be placed at at the N-terminus, C-terminus and/or within of the (poly-)peptide or protein of interest, or combinations thereof. Different protein or peptide tags may be combined. Protein or peptide tags may be repeated and for instance expressed in a tandem or triplet. On nucleic acid level, the coding sequence for such protein or peptide tags is typically placed in frame (i.e. in the same reading frame), 3′ to, 5′ to or within the coding sequence for the (poly-)peptide or protein of interest, or combinations thereof.

[0259] Protein and peptide tags may be classified based on their (primary) function. Exemplary protein and peptide tags envisaged in the context of the present invention include, without limitation, tags selected from the following groups. Affinity tags enable the purification of (poly-)peptides or proteins of interest and include, without limitation, chitin binding protein (CBP), maltose binding protein (MBP), Strep-tag, glutathione-S-transferase (GST) and poly(His) tags typically comprising six tandem histidine residues which form a nickel-binding structure. Solubilisation tags assist in proper folding and prevent precipitating of (poly-)peptides or proteins of interest and include thioredoxin (TRX) and poly(NANP). MBP- and GST-tags may be utilized as solubilisation tags as well. Chromatography tags alter the chromatographic properties of proteins or (poly-)peptides of interest and enable their separation via chromatographic techniques. Typically, chromatography tags consist of polyanionic amino acids, such as the FLAG-tag (which may typically comprise the amino acid sequence N-DYKDDDDK-C(SEQ ID NO:378). Epitope tags are short peptide sequences capable of binding to high-affinity antibodies, e.g. in western blotting, immunofluorescence or immunoprecipitation, but may also be used for purification of (poly-)peptides or proteins of interest. Epitope tags may be derived from pathogenic antigens, such as viruses, and include, without limitation, V5-tags (which may typically contain a short amino acid sequence GKPIPNPLLGLDST derived from the P/V proteins of paramyxovirus SV5), Myc-tags (which may typically contain a 10 amino acid segment of human proto-oncogene Myc (EQKLISEEDL (SEQ ID NO:379), HA-tags (which may typically comprise a short segment YPYDVPDYA (SEQ ID NO:380) from human influenza hemagglutinin protein) and NE-tags. Fluorescence tags like GFP and its variants and derivatives (e.g. mfGFP, EGFP) may be used for the detection of (poly-)peptides or proteins (either by direct visual readout, or by binding to anti-GFP antibodies) or as reporters. Protein tags may allow specific enzymatic modification (such as biotinylation by biotin ligase) or chemical modification (such as reaction with FlAsH-EDT2 for fluorescence imaging). Tags like thioredoxin, poly(NANP), can increase protein solubility, while others can help localize a target protein to a desired cellular compartment. Further tags include ABDz1-tag, Adenylate kinase (AK-tag), Calmodulin-binding peptide, CusF, Fh8, HaloTag, Heparin-binding peptide (HB-tag), Ketosteroid isomerase (KSI), Inntag, PA(NZ-1), Poly-Arg tag, Poly-Lys tag, S-tag and SUMO. Peptide or protein tags may be combined or repeated. After purification, protein or peptide tags may sometimes be removed by specific proteolysis (e.g. by TEV protease, Thrombin, Factor Xa or Enteropeptidase).

### Nuclear Localization Signal or Sequence (NLS)

[0260] A “nuclear localization signal” or “nuclear localization sequence” (NLS) is an amino acid sequence capable of targeting a (poly-)peptide or protein of interest to the nucleus—in other words, a nuclear localization signal “tags” a (poly-)peptide or protein of interest for nuclear import. Generally, proteins gain entry into the nucleus through the nuclear envelope. The nuclear envelope consists of concentric membranes, the outer and the inner membrane. The inner and outer membranes connect at multiple sites, forming channels between the cytoplasm and the nucleoplasm. These channels are occupied by nuclear pore complexes (NPCs), complex multiprotein structures that mediate the transport across the nuclear membrane.

[0261] Nuclear localization signals may suitably be (additionally) encoded by artificial nucleic acid (RNA) molecules encoding any (poly-)peptide or protein of interest as disclosed herein. Nuclear localization signals fused to or inserted into (poly-)peptides or proteins of interest may advantageously promote importin (aka karyopherin) binding and/or nuclear import of said (poly-)peptide or protein. Without wishing to be bound by specific theory, NLS may be particular useful when fused to or inserted into therapeutic (poly-)peptides or proteins that are intended for nuclear targeting, e.g. gene editing agents, transcriptional inducers or repressors. However, an NLS may be encoded with any other (poly-)peptide or protein disclosed herein as well. When encoded in combination with a (poly-)peptide or protein of interest, such nuclear localization signals may be placed at at the N-terminus, C-terminus and/or within the (poly-)peptide or protein of interest, or combinations thereof. It is also envisaged that the artificial nucleic acid (RNA) molecule may encode two or more NLS fused/inserted (in)to the encoded (poly-)peptide or protein of interest. On nucleic acid level, the coding sequence for such nuclear localization signal is typically placed in frame (i.e. in the same reading frame), 3′ to or 5′ to or within the coding sequence for the (poly-)peptide or protein of interest, or combinations thereof.

[0262] Typically, a “NLS” may comprise or consist of one or more short sequences of positively charged lysines or arginines, which are preferably exposed on the protein surface. A variety of NLS sequences are known in the art. Exemplary NLS sequences that may be selected for use with the present invention include, without limitation, the following. The best characterized transport signal is the classical NLS (cNLS) for nuclear protein import, which consists of either one (monopartite) or two (bipartite) stretches of basic amino acids. Typically, the monopartite motif is characterized by a cluster of basic residues preceded by a helix-breaking residue. Similarly, the bipartite motif consists of two clusters of basic residues separated by 9-12 residues. Monopartite cNLSs are exemplified by the SV40 large T antigen NLS (¹²⁶PKKKRRV¹³² (SEQ ID NO: 381) and bipartite cNLSs are exemplified by the nucleoplasmin NLS (¹⁵⁵KRPAATKKAGQAKKKK¹⁷⁰ (SEQ ID NO: 382). Consecutive residues from the N-terminal lysine of the monopartite NLS are referred to as P1, P2, etc. Monopartite cNLS typically require a lysine in the P1 position, followed by basic residues in positions P2 and P4 to yield a loose consensus sequence of K(K/R)X(K/R) (SEQ ID NO: 384) (Lange et al. J Biol Chem. 2007 Feb. 23; 282(8): 5101-5105).

### Signal Peptide

[0263] The term “signal peptide” (sometimes referred to as secretory signal peptide or SSP, signal sequence, leader sequence or leader peptide) refers to a typically short peptide (usually 16-30 amino acids long) that is usually present at the N-terminus of newly synthesized proteins destined towards the secretory pathway. These proteins include those that reside either inside certain organelles (the endoplasmic reticulum, golgi or endosomes), secreted from the cell, or inserted into most cellular membranes. In eukaryotic cells, signal peptides are typically cleaved from the nascent polypeptide chain immediately after it has been translocated into the membrane of the endoplasmic reticulum. The translocation occurs co-translationally and is dependent on a cytoplasmic protein-RNA complex (signal recognition particle, SRP). Protein folding and certain post-translational modifications (e.g. glycosylation) typically occur within the ER. Subsequently, the protein is typically transported into Golgi vesicles and secreted.

[0264] Signal peptides may suitably be (additionally) encoded by artificial nucleic acid (RNA) molecules encoding any (poly-)peptide or protein of interest as disclosed herein. Signal peptides fused to or inserted into (poly-)peptides or proteins of interest may advantageously mediate the transport of said (poly-)peptide or protein of interest (in)to a defined cellular compartment, e.g. the cell surface, the endoplasmic reticulum (ER) or the endosomal-lysosomal compartment. Preferably, signal peptides may be introduced into (poly-)peptide or protein of interest to promote secretion of said (poly-)peptides or proteins. In particular in case of artificial nucleic acids encoding antigenic (poly-)peptides or proteins are fused to a signal peptide, proper secretion may aid in triggering an immune response against said antigen, as its release and distribution preferably mimics a naturally occurring viral infection and ensures that professional antigen-presenting cells (APCs) are exposed to the encoded antigens. However, signal peptides may be usefully combined with any other (poly-)peptide or protein disclosed herein as well. When encoded in combination with a (poly-)peptide or protein of interest, such signal peptides may be placed at at the N-terminus, C-terminus and/or within the (poly-)peptide or protein of interest, preferably at its N-Terminus. On nucleic acid level, the coding sequence for such signal peptide is typically placed in frame (i.e. in the same reading frame), 5′ or 3′ or within the coding sequence for the (poly-)peptide or protein of interest, or combinations thereof, preferably 3′ to said coding sequence.

[0265] Signal peptides may typically exhibit a tripartite structure, consisting of a hydrophobic core region flanked by an n- and c-region. Typically, the n-region is one to five amino acids in length and comprises mostly positively charged amino acids. The c-region, which is located between the hydrophobic core region and the signal peptidase cleavage site, typically consists of three to seven polar, but mostly uncharged, amino acids. A specific pattern of amino acids (conforming to the so-called “(3,1)-rule”) is found near the cleavage site: the amino acid residues at positions 3 and 1 (relative to the cleavage site) are typically small and neutral.

[0266] Exemplary signal peptides envisaged in the context of the present invention include, without being limited thereto, signal sequences of classical or non-classical MHC-molecules (e.g. signal sequences of MHC I and II molecules, e.g. of the MHC class I molecule HLA-A*0201), signal sequences of cytokines or immunoglobulins, signal sequences of the invariant chain of immunoglobulins or antibodies, signal sequences of Lamp1, Tapasin, Erp57, Calretikulin, Calnexin, PLAT, EPO or albumin and further membrane associated proteins or of proteins associated with the endoplasmic reticulum (ER) or the endosomal-lysosomal compartment. Most preferably, signal sequences may be derived from (human) HLA-A2, (human) PLAT, (human) sEPO, (human) ALB, (human) IgE-leader, (human) CD5, (human) IL2, (human) CTRB2, (human) IgG-HC, (human) Ig-HC, (human) Ig-LC, GpLuc, (human) Igkappa or a fragment or variant of any of the aforementioned proteins, in particular HLA-A2, HsPLAT, sHsEPO, HsALB, HsPLAT(aa1-21), HsPLAT(aa1-22), IgE-leader, HsCD5(aa1-24), HsIL2(aa1-20), HsCTRB2(aa1-18), IgG-HC(aa1-19), Ig-HC(aa1-19), Ig-LC(aa1-19), GpLuc(1-17) or MmIgkappa.

[0267] Particular signal peptides and nucleic acid sequences encoding the same envisaged for use in the present invention are inter alia disclosed in WO 2017/081082 A2, which is incorporated by reference in its entirety herein.

### Peptide Linkers

[0268] A “peptide linker” or “spacer” is a short amino acid sequences joining domains, portions or parts of (poly-)peptides or proteins of interest as disclosed herein, for instance of multidomain-proteins or fusion proteins. The (poly-)peptides or proteins, or domains, portions or parts thereof are preferably functional, i.e. fulfil a specific biological function.

[0269] Peptide linkers may suitably be (additionally) encoded by artificial nucleic acid (RNA) molecules encoding any (poly-)peptide or protein of interest as disclosed herein. Peptide linkers may be inserted into (poly-)peptides or proteins of interest may advantageously ensure proper folding, flexibility and function of the (poly-)peptides or proteins of interest, or domains, portions or parts thereof. When encoded in combination with a (poly-)peptide or protein of interest, such signal peptides are typically placed between said (poly-)peptides or proteins, or their domains, portions or parts. On nucleic acid level, the coding sequence for such peptide linker is typically placed in frame (i.e. in the same reading frame), 5′ to, 3′ to or within the coding sequence(s) encoding (poly-)peptides or proteins, domains, portions or parts thereof.

[0270] Peptide linkers are typically short (comprising 1-150 amino acids, preferably 1-50 amino acids, more preferably 1 to 20 amino acids) and may preferably be composed of small, non-polar (e.g. Gly) or polar (e.g. Ser or Thr) amino acids. Peptide linkers are generally known in the art and may be classified into three types: flexible linkers, rigid linkers, and cleavable linkers. Flexible linkers are usually applied when joined (poly-)peptides or proteins, or domains, portions or parts thereof require a certain degree of movement, flexibility and/or interaction. Flexible linkers are generally rich in small, non-polar (e.g. Gly) or polar (e.g. Ser or Thr) amino acids to provide good flexibility and solubility, and support the mobility of the joined (poly-)peptides or proteins, or domains, portions or parts thereof. Exemplary flexible linker arm sequences typically contain about 4 to about 10 glycine residues. The incorporation of Ser or Thr may maintain the stability of the linker in aqueous solutions by forming hydrogen bonds with water molecules, and therefore reduces unfavorable interactions between the linker and the protein moieties.

[0271] The most commonly used flexible linkers have sequences consisting primarily of stretches of Gly and Ser residues (“GS” linker). For instance, the linker may have the following sequence: GS, GSG, SGG, SG, GGS, SGS, GSS, and SSG. The same sequence may be repeated multiple times (e.g. two, three, four, five or six times) to create a longer linker. It is also conceivable to introduce a single amino acid residue such as S or G as a peptide linker. An example of the most widely used flexible linker has the sequence of (G-G-G-G-S)ₙ (SEQ ID NO: 383). By adjusting the copy number “n”, the length of this GS linker can be optimized to achieve appropriate separation and/or flexibility of the joined (poly-)peptides or proteins, or domains, portions or parts thereof, or to maintain necessary inter-domain interactions. Aside from GS linkers, many other flexible linkers are known in the art. These flexible linkers are also rich in small or polar amino acids such as Gly and Ser, but may contain additional amino acids such as Thr and Ala to maintain flexibility, as well as polar amino acids such as Lys and Glu to improve solubility. Rigid linkers may be employed to ensure separation of the joined (poly-)peptides or proteins, or domains, portions or parts thereof and reduce interference or sterical hindrance. Cleavable linkers, on the other hand, may be introduced to release free functional (poly-)peptides or proteins, or domains, portions or parts thereof in vivo. For instance, the cleavable linkers may be Arg-Arg or Lys-Lys that is sensitive to cleavage with an enzyme such as cathepsin or trypsin. Peptide linkers may or may not be non-immunogenic (i.e. capable of triggering an immune response). Chen et al. Adv Drug Deliv Rev. 2013 Oct. 15; 65(10): 1357-1369 reviews the most commonly used peptide linkers and their applications, and is incorporated herein by reference in its entirety. Particular peptide linkers of interest and nucleic acid sequences encoding the same are inter alia disclosed in WO 2017/081082 A2, WO 2017/WO 2002/014478 A2, WO 2001/008636 A2, WO 2013/171505 A2, WO 2008/017517 A1 and WO 1997/047648 A1, which are incorporated by reference in their entirety as well.

### Multimerization Element

[0272] The term “multimerization element” or “multimerization domain” refers to (poly-)peptides or proteins capable of inducing or promoting the multimerization of (poly-)peptides or proteins of interest. The term includes oligomerization elements, tetramerization elements, trimerization elements or dimerization elements.

[0273] Multimerization elements may for instance suitably be (additionally) encoded by artificial nucleic acid (RNA) molecules encoding antigenic (poly-)peptides or proteins. Multimerization elements inserted into or fused to antigenic (poly-)peptides or proteins of interest may advantageously mediate the formation of multimeric antigen-complexes or antigenic nanoparticles, which are preferably capable of inducing, promoting or potentiating immune responses to said antigen. Thereby, multimerization elements may be used to mimic a “natural” infection with a pathogen (e.g., virus) exhibiting a plurality of antigens adjacent to each other (e.g., hemagglutinin (HA) antigen of the influenza virus). However, multimerization elements may be usefully combined with any other (poly-)peptide or protein of interest as well. When encoded in combination with a (poly-)peptide or protein of interest, such multimerization element can be placed at its N-Terminus, or the C-Terminus, or both. On nucleic acid level, the coding sequence for such multimerization element is typically placed in frame (i.e. in the same reading frame), 5′ or 3′ to the coding sequence for the (poly-)peptide or protein of interest.

[0274] When used in combination with a polypeptide or protein of interest in the context of the present invention, such multimerization element can be placed at the N-terminus, C-terminus and/or within the (poly-)peptide or protein of interest. On nucleic acid level, the coding sequence for such multimerization element is typically placed in frame (i.e. in the same reading frame), 5′ or 3′ to the coding sequence for the polypeptide or protein of interest.

[0275] Exemplary dimerization elements may be selected from e.g. dimerization elements/domains of heat shock proteins, immunoglobulin Fc domains and leucine zippers (dimerization domains of the basic region leucine zipper class of transcription factors). Exemplary trimerization and tetramerization elements may be selected from e.g. engineered leucine zippers (engineered a-helical coiled coil peptide that adopt a parallel trimeric state), fibritin foldon domain from enterobacteria phage T4, GCN4pll, CCN4-pLI, and p53. Exemplary oligomerization elements may be selected from e.g. ferritin, surfactant D, oligomerization domains of phosphoproteins of paramyxoviruses, complement inhibitor C4 binding protein (C4 bp) oligomerization domains, Viral infectivity factor (Vif) oligomerization domain, sterile alpha motif (SAM) domain, and von Wil lebrand factor type D domain.

[0276] Ferritin forms oligomers and is a highly conserved protein found in all animals, bacteria, and plants. Ferritin is a protein that spontaneously forms nanoparticles of 24 identical subunits. Ferritin-antigen fusion constructs potentially form oligomeric aggregates or “clusters” of antigens that may enhance the immune response. Surfactant D protein (SPD) is a hydrophilic glycoprotein that spontaneously self-assembles to form oligomers. An SPD-antigen fusion constructs may form oligomeric aggregates or “clusters” of antigens that may enhance the immune response. Phosphoprotein of paramyxoviruses (negative sense RNA viruses) functions as a transcriptional transactivator of the viral polymerase. Oligomerization of the phosphoprotein is critical for viral genome replication. A phosphoprotein-antigen fusion constructs may form oligomeric aggregates or “clusters” of antigens that may enhance the immune response. Complement inhibitor C4 binding Protein (C4 bp) may also be used as a fusion partner to generate oligomeric antigen aggregates. The C-terminal domain of C4 bp (57 amino acid residues in humans and 54 amino acid residues in mice) is both necessary and sufficient for the oligomerization of C4 bp or other polypeptides fused to it. A C4 bp-antigen fusion constructs may form oligomeric aggregates or “clusters” of antigens that may enhance the immune response. Viral infectivity factor (Vif) multimerization domain has been shown to form oligomers both in vitro and in vivo. The oligomerization of Vif involves a sequence mapping between residues 151 to 164 in the C-terminal domain, the 161 PPLP 164 motif (for human HIV-1, TPKKIKPPLP). A Vif-antigen fusion constructs may form oligomeric aggregates or “clusters” of antigens that may enhance the immune response.

[0277] The sterile alpha motif (SAM) domain is a protein interaction module present in a wide variety of proteins involved in many biological processes. The SAM domain that spreads over around 70 residues is found in diverse eukaryotic organisms. SAM domains have been shown to homo- and hetero-oligomerise, forming multiple self-association oligomeric architectures. A SAM-antigen fusion constructs may form oligomeric aggregates or “clusters” of antigens that may enhance the immune response. von Willebrand factor (vWF) contains several type D domains: D1 and D2 are present within the N-terminal propeptide whereas the remaining D domains are required for oligomerization. The vWF domain is found in various plasma proteins: complement factors B, C2, C3 and CR4; the Integrins (I-domains); collagen types VI, VII, XII and XIV; and other extracellular proteins. A vWF-antigen fusion constructs may form oligomeric aggregates or “clusters” of antigens that may enhance the immune response.

[0278] Particular multimerization elements and nucleic acid sequences encoding the same envisaged for use in the present invention are inter alia disclosed in WO 2017/081082 A2, which is incorporated by reference in its entirety herein.

### Virus-Like Particle Forming Element

[0279] The term “virus-like particle forming element” or “VLP-forming element” refers to (poly-)peptides or proteins capable of assembling into non-replicative and/or non-infective virus-like particles structurally resembling a virus particle. VLPs are essentially devoid of infectious and/or replicative viral genome or genome function. Typically, a VLP lacks all or part of the replicative and infectious components of the viral genome.

[0280] VLP-forming elements are typically viral or phage structural proteins (i.e. envelope proteins or capsid proteins) which preferably comprise repetitive high density displays of antigens forming conformational epitopes that can elicit strong adaptive immune responses.

[0281] VLP-forming elements may for instance suitably be (additionally) encoded by artificial nucleic acid (RNA) molecules encoding antigenic (poly-)peptides or proteins, but can, however, be usefully combined with any other (poly-)peptide or protein of interest as well. VLP-forming elements inserted into or fused to (poly-)peptides or proteins of interest may for instance be used to promote or improve antigen clustering and immunogenicity of an antigenic (poly-)peptide or protein of interest. When encoded in combination with a (poly-)peptide or protein of interest, such VLP-forming element can be placed at the N-terminus, C-terminus and/or within the (poly-)peptide or proteins of interest. On nucleic acid level, the coding sequence for such VLP-forming element is typically placed in frame (i.e. in the same reading frame), 5′ to, 3′ to or within the coding sequence for the (poly-)peptide or protein of interest.

[0282] Exemplary VLP-forming elements may be derived from RNA bacteriophages, bacteriophages, Hepatitis B virus (HBV), preferably its capsid protein or its envelope protein, measles virus, Sindbis virus, rotavirus, foot-and-mouth-disease virus, Norwalk virus, Alphavirus, retrovirus, preferably its GAG protein, retrotransposon Ty, preferably the protein pi, human Papilloma virus, Polyoma virus, Tobacco mosaic virus, Flock House Virus, cowpea mosaic virus (CPMV), cowpea chlorotic mottle virus (CCMV), or Sobemovirus. Particular VLP-forming elements and nucleic acid sequences encoding the same envisaged for use in the present invention are inter alia disclosed in WO 2017/081082 A2, which is incorporated by reference in its entirety herein.

### Transmembrane Elements

[0283] “Transmembrane elements” or“membrane spanning polypeptide elements” (also referred to as “transmembrane domains” or “TM”) are present in proteins that are integrated or anchored in cellular plasma membranes. Transmembrane elements thus preferably comprise or consist of a sequence of amino acid residues capable of spanning and, thereby, preferably anchoring a fused (poly-)peptide or protein in a phospholipid membrane. A transmembrane element may comprise at least about 15 amino acid residues, preferably at least 18, 20, 22, 24, 25, 30, 35 or 40 amino acid residues. Typical transmembrane elements are about 20±5 amino acids in length. The amino acid residues constituting the transmembrane element are preferably selected from non-polar, primarily hydrophobic amino acids. Preferably, at least 50%, 60%, 70%, 80%, 90%, 95% or more of the amino acids of a transmembrane element may be hydrophobic, e.g., leucines, isoleucines, tyrosines, or tryptophans. Transmembrane elements may in particular include a series of conserved serine, threonine, and tyrosine residues. Typical transmembrane elements are alpha-helical transmembrane elements. Transmembrane elements may comprise single hydrophobic alpha helices or beta barrel structures; whereas hydrophobic alpha helices are usually present in proteins that are present in membrane anchored proteins (e.g., seven transmembrane domain receptors), beta-barrel structures are often present in proteins that generate pores or channels.

[0284] Transmembrane elements may for instance suitably be (additionally) encoded by artificial nucleic acid (RNA) molecules encoding antigenic (poly-)peptides or proteins, but can, however, be usefully combined with any other (poly-)peptide or protein of interest as well. TM elements fused to or inserted into (poly-)peptides or proteins of interest may advantageously anchor said (poly-)peptide or protein in the cell plasma membrane. In case of antigenic (poly-)peptides or proteins, such anchoring may promote antigen clustering, preferably resulting in enhanced immune responses. However, TM elements may be combined with any other (poly-)peptide or protein as well. When encoded in combination with a (poly-)peptide or protein of interest, such transmembrane element can be placed at at the N-terminus, C-terminus and/or within of the (poly-)peptide or protein of interest. On nucleic acid level, the coding sequence for such transmembrane element is typically placed in frame (i.e. in the same reading frame), 5′ to, 3′ or within the coding sequence for the (poly-)peptide or protein of interest.

[0285] Exemplary transmembrane elements may be selected from the transmembrane domain of Hemagglutinin (HA) of Influenza virus, Env of HIV-1, EIAV (equine infectious anemia virus), MLV (murine leukemia virus), mouse mammary tumor virus, G protein of VSV (vesicular stomatitis virus), Rabies virus, or a transmembrane element of a seven transmembrane domain receptor. Particular transmembrane elements and nucleic acid sequences encoding the same envisaged for use in the present invention are inter alia disclosed in WO 2017/081082 A2, which is incorporated by reference in its entirety herein.

### Dendritic Cell Targeting Elements

[0286] The term “dendritic cell targeting element” refers to a (poly-)peptide or protein capable of targeting to dendritic cells (CDs). Dendritic cells (DCs), the most potent antigen presenting cells (APCs), link the innate immune response to the adaptive immune response. They bind and internalize pathogens/antigens and display fragments of the antigen on their membrane (via MHC molecules) to stimulate T-cell responses against those pathogens/antigens.

[0287] Dendritic cell targeting elements may for instance suitably be (additionally) encoded by artificial nucleic acid (RNA) molecules encoding antigenic (poly-)peptides or proteins, to target antigens to DCs in order to stimulate and induce effective immune responses. However, dendritic cell targeting elements can be usefully combined with any other (poly-)peptide or protein of interest as well. When used in combination with a polypeptide or protein of interest in the context of the present invention, such dendritic cell targeting element can be placed at the N-terminus, C-terminus and/or within the (poly-)peptide or protein of interest. On nucleic acid level, the coding sequence for such dendritic cell element is typically placed in frame (i.e. in the same reading frame), 5′ or 3′ to the coding sequence for the (poly-)peptide or protein of interest.

[0288] Dendritic cell targeting elements include (poly-)peptides and proteins (e.g., antibody fragments, receptor ligands) preferably capable of interacting with or binding to DC surface receptors, such as C-type lectins (mannose receptors (e.g., MR1, DEC-205 (CD205)), CD206, DC-SIGN (CD209), Clec9a, DCIR, Lox-1, MGL, MGL-2, Clec12A, Dectin-1, Dectin-2, langerin (CD207)), scavenger receptors, F4/80 receptors (EMR1), DC-STAMP, receptors for the Fc portion of antibodies (Fc receptors), toll-like receptors (e.g., TLR2, 5, 7, 8, 9) and complement receptors (e.g., CR1, CR2).

[0289] Exemplary dendritic cell targeting elements may be selected from anti-DC-SIGN antibodies, CD1.1 c specific single chain fragments (scFv), DEC205-specific single chain fragments (scFv), soluble PD-1, chemokine (C motif) ligand XCL1, CD40 ligand, human IgG1, murine IgG2a, anti Celec 9A, anti MHCII scFv. Particular dendritic cell targeting elements and nucleic acid sequences encoding the same envisaged for use in the present invention are inter alia disclosed in WO 2017/081082 A2 as well as in Apostolopoulos et al. J Drug Deliv. 2013; 2013:869718 and Kastenmûller et al. Nat Rev Immunol. 2014 October; 14(10):705-11, all of which are incorporated by reference in their entirety herein.

### Immunological Adjuvant Element

[0290] The term “immunological adjuvant elements”, or “adjuvant elements”, refers to (poly-)peptides or proteins that enhance the immune response, e.g. by triggering a danger response (e.g., damage-associated molecular pattern molecules (DAMPs)), activating the complement system (e.g., peptides/proteins involved in the classical complement pathway, the alternative complement pathway, and the lectin pathway) or triggering an innate immune response (e.g., pathogen-associated molecular pattern molecules, PAMPs).

[0291] Immunological adjuvant elements may for instance suitably be (additionally) encoded by artificial nucleic acid (RNA) molecules encoding antigenic (poly-)peptides or proteins, to enhance immune responses to the encoded antigens. However, immunological adjuvant elements can be usefully combined with any other (poly-)peptide or protein of interest as well. When used in combination with a polypeptide or protein of interest in the context of the present invention, immunological adjuvant elements can be placed at the N-terminus, C-terminus and/or within the (poly-)peptide or protein of interest. On nucleic acid level, the coding sequence for such immunologic adjuvant element is typically placed in frame (i.e. in the same reading frame), 5′ to, 3′ to or within the coding sequence for the (poly-)peptide or protein of interest.

[0292] Exemplary immunological adjuvant elements may be selected from heat shock proteins (e.g., HSP60, HSP70, gp96), flagellin FliC, high mobility group box 1 proteins (e.g., HMGN1), extra domain A of fibronectin (EDA), C3 protein fragments (e.g. C3d), transferrin, β-defensin, or any other peptide/protein PAMP-receptor (PRs) ligand, DAMP or element that activates the complement system. Particular immunological adjuvant elements and nucleic acid sequences encoding the same envisaged for use in the present invention are inter alia disclosed in WO 2017/081082 A2, which is incorporated by reference in its entirety herein.

### Elements Promoting Antigen Presentation

[0293] The term “element promoting antigen presentation” refers to (poly-)peptides or proteins that are capable of mediating of promoting entry into the lysosomal/proteasomal or exosomal pathway and/or loading and presentation of processed (poly-)peptides or proteins onto major histocompatibility complex (MHC) molecules (MHC-I or MHC-II) and presentation in an MHC-bound form on the cell surface.

[0294] Elements promoting antigen presentation may for instance suitably be (additionally) encoded by artificial nucleic acid (RNA) molecules encoding antigenic (poly-)peptides or proteins, to enhance processing and MHC-presentation of the encoded antigens. However, elements promoting antigen presentation can be usefully combined with any other (poly-)peptide or protein of interest as well. When used in combination with a (poly-)peptide or protein of interest, elements promoting antigen presentation can be placed at the N-terminus, C-terminus and/or within said (poly-)peptide or protein of interest, or combinations thereof. On nucleic acid level, the coding sequence for such elements promoting antigen presentation is typically placed in frame (i.e. in the same reading frame), 5′ to, 3′ to or within the coding sequence for the (poly-)peptide or protein of interest.

[0295] Exemplary elements promoting antigen presentation may be selected from MHC invariant chain (li), invariant chain (li) lysosome targeting signal, sorting signal of the lysosomal-associated membrane protein LAMP-1, lysosomal integral membrane protein-II (LIMP-II) and C1C2 Lactadherin domain. Particular elements promoting antigen presentation and nucleic acid sequences encoding the same envisaged for use in the present invention are inter alia disclosed in WO 2017/081082 A2, which is incorporated by reference in its entirety herein.

### 2A Peptides

[0296] Viral “2A peptides” (also referred to as “self-cleaving” peptides) are (poly-)peptides or proteins which allow the expression of multiple proteins from a single open reading frame. The terms “2A peptide” and “2A element” are used interchangeably herein. The mechanism by the 2A sequence for generating two proteins from one transcript is by ribosome skipping—a normal peptide bond is impaired at 2A, resulting in two discontinuous protein fragments from one translation event.

[0297] 2A peptides may for instance suitably be (additionally) encoded by artificial nucleic acid (RNA) molecules encoding (poly-)peptides or proteins that require cleavage. For instance, 2A peptides may be inserted into polypeptide fusions between two or more two antigenic (poly-)peptides, or between a protein of interest and a signal peptide. The coding sequence for such a 2A peptide is typically located in between the (poly-)peptide or protein encoding sequences. Self-cleavage of the 2A peptide preferably yields at least one separate (poly-)peptide or protein of interest (e.g. a protein of interest without its signal peptide, or two antigenic (poly-)peptides or proteins of interest). 2A peptides may also suitably be encoded by artificial nucleic acid (RNA) molecules encoding multi-chain (poly-)peptides or proteins of interest, such as antibodies. Such artificial nucleic acid (RNA) molecules may comprise, for instance, two coding sequences encoding two antibody chains separated by a nucleic acid sequence encoding a 2A peptide.

[0298] When used in combination with a polypeptide or protein of interest in the context of the present invention, 2A peptides can be placed at the N-terminus, C-terminus and/or within the (poly-)peptide or protein of interest, or combinations thereof. On nucleic acid level, the coding sequence for such 2A peptide is typically placed in frame (i.e. in the same reading frame), 5′ to, 3′ to or within the coding sequence for the (poly-)peptide or protein of interest.

[0299] Exemplary 2A peptides may be derived from foot-and-mouth diseases virus, from equine rhinitis A virus, Thosea asigna virus, Porcine teschovirus-1. Particular 2A peptides and nucleic acid sequences encoding the same envisaged for use in the present invention are inter alia disclosed in WO 2017/081082 A2, which is incorporated by reference in its entirety herein.

### Isoforms, Homologs, Variants, Fragments and Derivatives

[0300] Each of the (poly-)peptides and proteins of interest and, where applicable, each additional tag, sequence, linker, element or domain disclosed herein also includes isoforms, homologs, variants, fragments and derivatives thereof. Thus, artificial nucleic acid (RNA) molecules of the invention may encode in their at least one coding region, at least one therapeutic, antigenic or allergenic (poly-)peptide or protein, and optionally at least one additional tag, sequence, linker, element or domain as disclosed herein, or an isoform, homolog, variant, fragment or derivative thereof. Such isoforms, homologs, variants, fragments and derivatives are preferably functional, i.e. exhibit the same desired biological properties, and/or capable of exerting the same desired biological function as the respective reference (poly-)peptide, protein, tag, sequence, linker, element or domain. For example, isoforms, homologs, variants, fragments and derivatives of therapeutic (poly-)peptides or proteins are preferably capable of mediating the desired therapeutic effect. Isoforms, homologs, variants, fragments and derivatives of antigenic or allergenic (poly-)peptides or proteins are preferably capable of mediating the desired antigenic or allergenic effect, i.e. more preferably of inducing an immune response or allergenic response.

[0301] The term “isoform” refers to post-translational modification (PTM) variants of (poly-)peptides, proteins or amino acid sequences as disclosed herein. PTMs may result in covalent or non-covalent modifications of a given protein. Common post-translational modifications include glycosylation, phosphorylation, ubiquitinylation, S-nitrosylation, methylation, N-acetylation, lipidation, disulfide bond formation, sulfation, acylation, deamination etc. Different PTMs may result, e.g., in different chemistries, activities, localizations, interactions or conformations.

[0302] The term “homolog” encompasses “orthologs” and “paralogs”. “Orthologs” are (poly-)peptides or proteins or amino acid sequences encoded by genes in different species that evolved from a common ancestral gene by speciation. “Paralogs” are genes produced via gene duplication within a genome.

[0303] The term “variant” in the context of (poly-)peptides, proteins or amino acid sequences refers to “(amino acid) sequence variants”, i.e. (poly-)peptides, proteins or amino acid sequences with at least one amino acid mutation as compared to a reference (or “parent”) amino acid sequence. Amino acid mutations include amino acid substitutions, insertions or deletions. The term (amino acid) “substitution” may refers to conservative or non-conservative amino acid substitutions. In some embodiments, it may be preferred that a “variant” essentially comprises conservative amino acid substitutions, wherein amino acids, originating from the same class, are exchanged for one another. In particular, these are amino acids having aliphatic side chains, positively or negatively charged side chains, aromatic groups in the side chains or amino acids, the side chains of which can form hydrogen bridges, e.g. side chains which have a hydroxyl function. By conservative constitution, e.g. an amino acid having a polar side chain may be replaced by another amino acid having a corresponding polar side chain, or, for example, an amino acid characterized by a hydrophobic side chain may be substituted by another amino acid having a corresponding hydrophobic side chain (e.g. serine (threonine) by threonine (serine) or leucine (isoleucine) by isoleucine (leucine)).

[0304] Preferably, the term “variant” as used herein includes naturally occurring variants, such as prepeptides, preproproteins, proproteins, that have been subjected to post-translational proteolytic processing (this may involve removal of the N-terminal methionine, signal peptide, and/or the conversion of an inactive or non-functional protein to an active or functional one), transcript variants, as well as naturally occurring and engineered mutant (poly-)peptides, proteins and amino acid sequences. The terms “transcript variants” or “splice variants” refer to variants of (poly-)peptides, proteins or amino acid sequences produced from messenger RNAs that are initially transcribed from the same gene, but are subsequently subjected to alternative (or differential) splicing, where particular exons of a gene may be included within or excluded from the final, processed messenger RNA (mRNA). A “variant” as defined herein may be derived from, isolated from, related to, based on or homologous to the reference (poly-)peptide, protein or amino acid sequence. A “variant” (poly-)peptide, protein or amino acid sequence may preferably have a sequence identity of at least 5%, 10%, 20%, 30%, 40%, 50%, 60%, 70%, 80%, 85%, 86%, 87%, 88%, 89%, 90%, 91%, 92%, 93%, 94%, 95%, 96%, 97%, 98%, or 99%, preferably of at least 70%, more preferably of at least 80%, even more preferably at least 85%, even more preferably of at least 90% and most preferably of at least 95% or even 97%, with an amino acid sequence of the respective reference (poly-)peptide, protein or amino acid sequence.

[0305] The term “fragment” in the context of (poly-)peptides, proteins or amino acid sequences refers to (poly-)peptides, proteins or amino acid sequences which consist of a continuous subsequence of the full-length amino acid sequence of a reference (or “parent”) (poly-)peptide, proteins or amino acid sequences. The “fragment” is, with regard to its amino acid sequence, N-terminally, C-terminally and/or intrasequentially truncated as compared to the reference amino acid sequence. Such truncation may occur either on the amino acid level or on the nucleic acid level, respectively. In other words, a “fragment” may typically consist of a shorter portion of a full-length amino acid sequence and thus preferably consists of an amino acid sequence that is identical to the corresponding stretch within a full-length reference amino acid sequence. The term includes naturally occurring fragments (such as fragments resulting from naturally occurring in vivo protease activity) as well as engineered fragments. Fragments may be derived from naturally occurring (poly-)peptides, proteins or amino acid sequences as disclosed herein, or from isoforms, homologs or variants thereof.

[0306] A “fragment” may comprise at least 5 contiguous amino acid residues, at least 10 contiguous amino acid residues, at least 15 contiguous amino acid residues, at least 20 contiguous amino acid residues, at least 25 contiguous amino acid residues, at least 40 contiguous amino acid residues, at least 50 contiguous amino acid residues, at least 60 contiguous amino residues, at least 70 contiguous amino acid residues, at least contiguous 80 amino acid residues, at least contiguous 90 amino acid residues, at least contiguous 100 amino acid residues, at least contiguous 125 amino acid residues, at least 150 contiguous amino acid residues, at least contiguous 175 amino acid residues, at least contiguous 200 amino acid residues, or at least contiguous 250 amino acid residues of respective reference amino acid sequences.

[0307] It may be preferred that “fragments” consists of a continuous stretch of amino acids corresponding to a continuous amino acid stretch in the reference amino acid sequence, wherein the fragment corresponds to at least 20%, preferably at least 30%, more preferably at least 40%, more preferably at least 50%, even more preferably at least 60%, even more preferably at least 70%, and most preferably at least 80% of the total (i.e. full-length) reference amino acid sequence. A sequence identity indicated with respect to a “fragment” may preferably refer to the full-length reference amino acid sequence. A (poly-)peptide, protein or amino acid sequence “fragment” may preferably have an amino acid sequence identity of at least 5%, 10%, 20%, 30%, 40%, 50%, 60%, 70%, 80%, 85%, 86%, 87%, 88%, 89%, 90%, 91%, 92%, 93%, 94%, 95%, 96%, 97%, 98%, or 99%, preferably of at least 70%, more preferably of at least 80%, even more preferably at least 85%, even more preferably of at least 90% and most preferably of at least 95% or even 97%, with the reference amino acid sequence.

[0308] The term “derivative” in the context of (poly-)peptides, proteins or amino acid sequences refers to modifications of a reference or “parent” (poly-)peptide, protein or amino acid sequence including or lacking an additional biological property or functionality. For instance, (poly-)peptide or protein “derivatives” may be modified through the introduction or removal of domains that confer a particular biological functionality, such as the capability of binding to a (further) target, or an enzymatic activity. Other modifications may modulate the pharmacokinetic/pharmacodynamics properties, such as stability, biological half-life, bioavailability, absorption; distribution and/or reduced clearance. “Derivatives” may be prepared by introducing or deleting amino acid sequences post-translationally or on a nucleic acid sequence level (cf. using standard genetic engineering techniques (cf. Sambrook J et al., 2012 (4th ed.), Molecular cloning: a laboratory manual. Cold Spring Harbor Laboratory, Cold Spring Harbor, New York). A “derivative” may be derived from, i.e. correspond to a modified full-length wild-type (poly-)peptide, protein or amino acid sequence, or an isoform, homolog, fragment or variant thereof. The term “derivatives” further include (poly-)peptides, proteins or amino acid sequences that are chemically modified or modifiable after translation, e.g. by PEGylation or PASylation.

[0309] According to some embodiments, the particularly preferred that if, in addition to the (poly-)peptide or protein of interest, a further (poly-)peptide or protein is encoded by the at least one coding sequence as defined herein—the encoded peptide or protein is preferably no histone protein, no reporter protein (e.g. Luciferase, GFP and its variants (such as eGFP, RFP or BFP), and/or no marker or selection protein, including alpha-globin, galactokinase and Xanthine:Guanine phosphoribosyl transferase (GPT), hypoxanthine-guanine phosphoribosyltransferase (HGPRT), beta-galactosidase, galactokinase, alkaline phosphatase, secreted embryonic alkaline phosphatase (SEAP) or a resistance gene (such as a resistance gene against neomycin, puromycin, hygromycin and zeocin). In preferred embodiments, the artificial nucleic acid (RNA) molecule, does not encode a reporter gene or a marker gene. In preferred embodiments, the artificial nucleic acid (RNA) molecule, does not encode luciferase. In other embodiments, the artificial nucleic acid (RNA) molecule, does not encode GFP or a variant thereof.

### Nucleic Acid Sequences

[0310] The artificial nucleic acid (RNA) molecule of the invention may encode any desired (poly-)peptide or protein disclosed herein. Specifically, said artificial nucleic acid (RNA) molecule may comprise at least one coding region encoding a (poly-)peptide or protein comprising or consisting of an amino acid sequence according to any one of SEQ ID NOs: 42-45, or a homolog, variant, fragment or derivative thereof, preferably having an amino acid sequence having, in increasing order of preference, at least 50%, 60%, 70%, 80%, 90%, 95%, 96%, 97%, 98%, or 99% sequence identity to the amino acid sequence according to any one of SEQ ID NOs: 42-45, or a variant or fragment of any of these sequences.

[0311] Accordingly, the artificial nucleic acid (RNA) molecule of the invention may preferably comprise or consist of a nucleic acid sequence according to any one of SEQ ID NOs: 46-49; or a nucleic acid sequence having, in increasing order of preference, at least 50%, 60%, 70%, 80%, 90%, 95%, 96%, 97%, 98%, or 99% sequence identity to the any one of said nucleic acid sequences.

[0312] The present invention envisages the beneficial combination of coding regions encoding (poly-)peptides or proteins of interest operably linked to UTR elements as defined herein, in order to preferably increase the expression of said encoded proteins. Preferably, said artificial nucleic acids may thus comprise or consist of a nucleic acid sequence according to any one of SEQ ID NOs: 50-368, or a (functional) variant, fragment or derivative thereof, in particular nucleic acid sequence having, in increasing order of preference, at least 5%, 10%, 20%, 30%, 40%, 50%, 60%, 70%, 80%, 85%, 86%, 87%, 88%, 89%, 90%, 91%, 92%, 93%, 94%, 95%, 96%, 97%, 98%, or 99%, preferably of at least 70%, more preferably of at least 80%, even more preferably at least 85%, even more preferably of at least 90% and most preferably of at least 95% or even 97%, sequence identity to any of these sequences.

### Nucleic Acid Molecules and RNAs

[0313] The terms “nucleic acid”, “nucleic acid molecule” or “artificial nucleic acid molecule” means any DNA- or RNA-molecule and is used synonymous with polynucleotide. Where ever herein reference is made to a nucleic acid or nucleic acid sequence encoding a particular protein and/or peptide, said nucleic acid or nucleic acid sequence, respectively, preferably also comprises regulatory sequences allowing in a suitable host, e.g. a human being, its expression, i.e. transcription and/or translation of the nucleic acid sequence encoding the particular protein or peptide.

[0314] The inventive artificial nucleic acid molecule may be a DNA or preferably be an RNA. It will be understood that the term “RNA” refers to ribonucleic acid molecules characterized by the specific succession of their nucleotides joined to form said molecules (i.e. their RNA sequence). The term “RNA” may thus be used to refer to RNA molecules or RNA sequences as will be readily understood by the skilled person in the respective context. For instance, the term “RNA” as used in the context of the invention preferably refers to an RNA molecule (said molecule being characterized, inter alia, by its particular RNA sequence). In the context of the sequence modifications disclosed herein, the term “RNA” will be understood to relate to (modified) RNA sequences, but typically also includes the resulting RNA molecules (which are modified with regard to their RNA sequence). In preferred embodiments, the RNA may be an mRNA, a viral RNA, a self-replicating RNA or a replicon RNA, preferably an mRNA.

### Mono-, Bi- or Multicistronic RNAs

[0315] In preferred embodiments, the artificial nucleic acid (RNA) molecule, of the invention may be mono-, bi-, or multicistronic. Bi- or multicistronic RNAs typically comprise two (bicistronic) or more (multicistronic) open reading frames (ORF).

[0316] An open reading frame in this context is a sequence of codons that is translatable into a peptide or protein. The coding sequences in a bi- or multicistronic artificial nucleic acid (RNA) molecule, may encode the same or, preferably, distinct (poly-)peptides or proteins of interest. In this context, “distinct” (poly-)peptides or proteins means (poly-)peptides or proteins being encoded by different genes, having a different amino acid sequence, exhibiting different biochemical or biological properties, having different biological functions and/or being derived from different species. In other words, coding sequences encoding two or more “distinct” (poly-)peptides or proteins, may for instance encode: (a) protein A and protein B, wherein A and B are derived from gene A′ and B′, respectively, or (b) human protein A and mouse protein A, or (c) protein A and protein A′, wherein protein A′ is a variant, fragment or derivative of A, and optionally exhibits a different amino acid sequence and/or different biochemical or biological properties as compared to A.

[0317] Bi- or even multicistronic artificial nucleic acid (RNA) molecules, may encode, for example, two or more, i.e. at least two, three, four, five, six or more (preferably distinct) (poly-)peptides or proteins of interest.

[0318] In some embodiments, the coding sequences encoding two or more (preferably distinct) (poly-)peptides or proteins of interest, may be separated in the bi- or multicistronic artificial nucleic acid (RNA) molecule, by at least one IRES (internal ribosomal entry site) sequence. The term “IRES” (internal ribosomal entry site) refers to an RNA sequence that allows for translation initiation. An IRES can function as a sole ribosome binding site, but it can also serve to provide a bi- or even multicistronic artificial nucleic acid (RNA) molecule which encodes several (preferably distinct) (poly-)peptides or proteins of interest (or homologs, variants, fragments or derivatives thereof), which are to be translated by the ribosomes independently of one another. Examples of IRES sequences, which can be used according to the invention, are those derived from picornaviruses (e.g. FMDV), pestiviruses (CFFV), polioviruses (PV), encephalomyocarditis viruses (ECMV), foot and mouth disease viruses (FMDV), hepatitis C viruses (HCV), classical swine fever viruses (CSFV), mouse leukoma virus (MLV), simian immunodeficiency viruses (SIV) or cricket paralysis viruses (CrPV).

[0319] According to further embodiments the at least one coding sequence of the artificial nucleic acid (RNA) molecule, of the invention may encode at least two, three, four, five, six, seven, eight and more, preferably distinct, (poly-)peptides or proteins of interest linked with or without an amino acid linker sequence, wherein said linker sequence may comprise rigid linkers, flexible linkers, cleavable linkers (e.g., self-cleaving peptides) or a combination thereof.

[0320] Preferably, the artificial nucleic acid (RNA) molecule, comprises a length of about 50 to about 20000, or 100 to about 20000 nucleotides, preferably of about 250 to about 20000 nucleotides, more preferably of about 500 to about 10000, even more preferably of about 500 to about 5000.

[0321] The artificial nucleic acid (RNA) molecule, of the invention may further be single stranded or double stranded. When provided as a double stranded RNA or DNA, the artificial nucleic acid molecule preferably comprises a sense and a corresponding antisense strand.

### Nucleic Acid Modifications

[0322] Artificial nucleic acid molecules, preferably RNAs, of the invention, may be provided in the form of modified nucleic acids. Suitable nucleic acid modifications envisaged in the context of the present invention are described below.

[0323] According to preferred embodiments, the at least one artificial nucleic acid (RNA) molecule, of the invention may be “modified”, i.e. comprise at least one modification as defined herein. Said modification may preferably be a sequence modification, or a (chemical) nucleobase modification as described herein. A “modification” as defined herein preferably leads to a stabilization of said artificial nucleic acid (RNA) molecule. More preferably, the invention thus provides a “stabilized” artificial nucleic acid (RNA) molecule. According to preferred embodiments, the artificial nucleic acid (RNA) molecule, of the invention may thus be provided as a “stabilized” artificial nucleic acid (RNA) molecule, in particular mRNA, i.e. which is essentially resistant to in vivo degradation (e.g. by an exo- or endo-nuclease).

### Nucleobase Modifications

[0324] Artificial nucleic acid molecules of the invention may be modified in their nucleotides, more specifically in the phosphate backbone, the sugar moiety or the nucleobases. In other words, the present invention envisages that a “modified” artificial nucleic acid (RNA) molecule, may contain nucleotide/nucleoside analogues/modifications (modified nucleotides or nucleosides), e.g. backbone modifications, sugar modifications or nucleobase modifications.

### Phosphate Backbone Modifications

[0325] Artificial nucleic acid molecules of the invention may comprise backbone modifications, i.e. nucleotides that are modified in their phosphate backbone. The term “backbone modification” refers to chemical modifications of the nucleotides' phosphate backbone, which may stabilize the backbone-modified nucleic acid molecule. A “backbone modification” is therefore understood as a modification, in which phosphates of the backbone of the nucleotides contained in said artificial nucleic acid (RNA) molecule, are chemically modified.

[0326] The phosphate groups of the backbone can be modified by replacing one or more of the oxygen atoms with a different substituent. Further, the modified nucleotides can include the full replacement of an unmodified phosphate moiety with a modified phosphate as described herein.

[0327] Examples of modified phosphate groups include, but are not limited to, phosphorothioate, phosphoroselenates, borano phosphates, borano phosphate esters, hydrogen phosphonates, phosphoroamidates, alkyl or aryl phosphonates and phosphotriesters. Phosphorodithioates have both non-linking oxygens replaced by sulphur. The phosphate linker can also be modified by the replacement of a linking oxygen with nitrogen (bridged phosphoroamidates), sulphur (bridged phosphorothioates) and carbon (bridged methylene-phosphonates).

[0328] Preferably, “backbone-modified” artificial nucleic acid molecules, preferably RNAs, may comprise phosphorothioate-modified backbones, wherein preferably at least one of the phosphate oxygens contained in the phosphate backbone is replaced by a sulphur atom. Further suitable phosphate backbone modifications include the incorporation of non-ionic phosphate analogues, such as, for example, alkyl and aryl phosphonates, in which the charged phosphonate oxygen is replaced by an alkyl or aryl group, or phosphodiesters and alkylphosphotriesters, in which the charged oxygen residue is present in alkylated form. Such backbone modifications typically include, without limitation, modifications from the group consisting of methylphosphonates, phosphoramidates and phosphorothioates (e.g. cytidine-5′-O-(1-thiophosphate)).

### Sugar Modifications:

[0329] Artificial nucleic acid molecules of the invention may comprise sugar modifications, i.e. nucleotides that are modified in their sugar moiety. The term “sugar modification” refers to chemical modifications of the nucleotides' sugar moiety. A “sugar modification” is therefore understood as a chemical modification of the sugar of the nucleotides of the artificial nucleic acid (RNA) molecule.

[0330] For example, the 2′ hydroxyl group (OH) can be modified or replaced with a number of different “oxy” or “deoxy” substituents. Examples of “oxy”-2′ hydroxyl group modifications include, but are not limited to, alkoxy or aryloxy (—OR, e.g., R═H, alkyl, cycloalkyl, aryl, aralkyl, heteroaryl or sugar); polyethyleneglycols (PEG), —O(CH₂CH₂O)nCH₂CH₂OR; “locked” nucleic acids (LNA) in which the 2′ hydroxyl is connected, e.g., by a methylene bridge, to the 4′ carbon of the same ribose sugar; and amino groups (—O-amino, wherein the amino group, e.g., NRR, can be alkylamino, dialkylamino, heterocyclyl, arylamino, diarylamino, heteroarylamino, or diheteroaryl amino, ethylene diamine, polyamino) or aminoalkoxy.

[0331] “Deoxy” modifications include hydrogen, amino (e.g. NH₂; alkylamino, dialkylamino, heterocyclyl, arylamino, diaryl amino, heteroaryl amino, diheteroaryl amino, or amino acid); or the amino group can be attached to the sugar through a linker, wherein the linker comprises one or more of the atoms C, N, and O.

[0332] Modified sugar moieties may contain one or more carbons that possess the opposite stereochemical configuration as compared to the stereochemical configuration of the corresponding carbon in ribose. Thus, a sugar-modified artificial nucleic acid (RNA) molecule, may include nucleotides containing, for instance, arabinose as the sugar.

### Nucleobase Modifications:

[0333] Artificial nucleic acid molecules of the invention may comprise nucleobase modifications, i.e. nucleotides that are modified in their nucleobase moiety. The term “nucleobase modification” refers to chemical modifications of the nucleotides' nucleobase moiety. A “nucleobase modification” is therefore understood as a chemical modification of the nucleobase of the nucleotides of the artificial nucleic acid (RNA) molecule. Suitable nucleotides or nucleosides that are modified in their nucleobase moiety (also referred to as “nucleoside analogous” or “nucleotide analogues”) may advantageously increase the stability of the artificial nucleic acid (RNA) molecule and/or enhance the expression of a (poly-)peptide or protein encoded by its at least one coding region.

[0334] Examples of nucleobases found in RNA include, but are not limited to, adenine, guanine, cytosine and uracil. For example, the nucleotides described herein can be chemically modified on the major groove face. In some embodiments, the major groove chemical modifications can include an amino group, a thiol group, an alkyl group, or a halo group.

[0335] When referring to preferred “nucleoside modifications (nucleoside analogues)” below, the respective modified nucleotides (nucleotide analogues) are equally envisaged, and vice versa.

[0336] In some embodiments, the nucleotide analogues/modifications are selected from nucleobase modifications, which are preferably selected from 2-amino-6-chloropurineriboside-5′-triphosphate, 2-Aminopurine-riboside-5′-triphosphate; 2-aminoadenosine-5′-triphosphate, 2′-Amino-2′-deoxycytidine-triphosphate, 2-thiocytidine-5′-triphosphate, 2-thiouridine-5′-triphosphate, 2′-Fluorothymidine-5′-triphosphate, 2′-O-Methyl-inosine-5′-triphosphate 4-thiouridine-5′-triphosphate, 5-aminoallylcytidine-5′-triphosphate, 5-aminoallyluridine-5′-triphosphate, 5-bromocytidine-5′-triphosphate, 5-bromouridine-5′-triphosphate, 5-Bromo-2′-deoxycytidine-5′-triphosphate, 5-Bromo-2′-deoxyuridine-5′-triphosphate, 5-iodocytidine-5′-triphosphate, 5-Iodo-2′-deoxycytidine-5′-triphosphate, 5-iodouridine-5′-triphosphate, 5-Iodo-2′-deoxyuridine-5′-triphosphate, 5-methylcytidine-5′-triphosphate, 5-methyluridine-5′-triphosphate, 5-Propynyl-2′-deoxycytidine-5′-triphosphate, 5-Propynyl-2′-deoxyuridine-5′-triphosphate, 6-azacytidine-5′-triphosphate, 6-azauridine-5′-triphosphate, 6-chloropurineriboside-5′-triphosphate, 7-deazaadenosine-5′-triphosphate, 7-deazaguanosine-5′-triphosphate, 8-azaadenosine-5′-triphosphate, 8-azidoadenosine-5′-triphosphate, benzimidazole-riboside-5′-triphosphate, N1-methyladenosine-5′-triphosphate, N1-methylguanosine-5′-triphosphate, N6-methyladenosine-5′-triphosphate, O6-methylguanosine-5′-triphosphate, pseudouridine-5′-triphosphate, or puromycin-5′-triphosphate, xanthosine-5′-triphosphate. Particular preference is given to nucleotides for base modifications selected from the group of base-modified nucleotides consisting of 5-methylcytidine-5′-triphosphate, 7-deazaguanosine-5′-triphosphate, 5-bromocytidine-5′-triphosphate, and pseudouridine-5′-triphosphate.

[0337] In some embodiments, modified nucleosides include pyridin-4-one ribonucleoside, 5-aza-uridine, 2-thio-5-aza-uridine, 2-thiouridine, 4-thio-pseudouridine, 2-thio-pseudouridine, 5-hydroxyuridine, 3-methyluridine, 5-carboxymethyl-uridine, 1-carboxymethyl-pseudouridine, 5-propynyl-uridine, 1-propynyl-pseudouridine, 5-taurinomethyluridine, 1-taurinomethyl-pseudouridine, 5-taurinomethyl-2-thio-uridine, 1-taurinomethyl-4-thio-uridine, 5-methyl-uridine, 1-methyl-pseudouridine, 4-thio-1-methyl-pseudouridine, 2-thio-1-methyl-pseudouridine, 1-methyl-1-deaza-pseudouridine, 2-thio-1-methyl-1-deaza-pseudouridine, dihydrouridine, dihydropseudouridine, 2-thio-dihydrouridine, 2-thio-dihydropseudouridine, 2-methoxyuridine, 2-methoxy-4-thio-uridine, 4-methoxy-pseudouridine, and 4-methoxy-2-thio-pseudouridine.

[0338] In some embodiments, modified nucleosides include 5-aza-cytidine, pseudoisocytidine, 3-methyl-cytidine, N4-acetylcytidine, 5-formylcytidine, N4-methylcytidine, 5-hydroxymethylcytidine, 1-methyl-pseudoisocytidine, pyrrolo-cytidine, pyrrolo-pseudoisocytidine, 2-thio-cytidine, 2-thio-5-methyl-cytidine, 4-thio-pseudoisocytidine, 4-thio-1-methyl-pseudoisocytidine, 4-thio-1-methyl-1-deaza-pseudoisocytidine, 1-methyl-1-deaza-pseudoisocytidine, zebularine, 5-aza-zebularine, 5-methyl-zebularine, 5-aza-2-thio-zebularine, 2-thio-zebularine, 2-methoxy-cytidine, 2-methoxy-5-methyl-cytidine, 4-methoxy-pseudoisocytidine, and 4-methoxy-1-methyl-pseudoisocytidine.

[0339] In other embodiments, modified nucleosides include 2-aminopurine, 2, 6-diaminopurine, 7-deaza-adenine, 7-deaza-8-aza-adenine, 7-deaza-2-aminopurine, 7-deaza-8-aza-2-aminopurine, 7-deaza-2,6-diaminopurine, 7-deaza-8-aza-2,6-diaminopurine, 1-methyladenosine, N6-methyladenosine, N6-isopentenyladenosine, N6-(cis-hydroxyisopentenyl)adenosine, 2-methylthio-N6-(cis-hydroxyisopentenyl) adenosine, N6-glycinylcarbamoyladenosine, N6-threonylcarbamoyladenosine, 2-methylthio-N6-threonyl carbamoyladenosine, N6,N6-dimethyladenosine, 7-methyladenine, 2-methylthio-adenine, and 2-methoxy-adenine.

[0340] In other embodiments, modified nucleosides include inosine, 1-methyl-inosine, wyosine, wybutosine, 7-deaza-guanosine, 7-deaza-8-aza-guanosine, 6-thio-guanosine, 6-thio-7-deaza-guanosine, 6-thio-7-deaza-8-aza-guanosine, 7-methyl-guanosine, 6-thio-7-methyl-guanosine, 7-methylinosine, 6-methoxy-guanosine, 1-methylguanosine, N2-methylguanosine, N2,N2-dimethylguanosine, 8-oxo-guanosine, 7-methyl-8-oxo-guanosine, 1-methyl-6-thio-guanosine, N2-methyl-6-thio-guanosine, and N2,N2-dimethyl-6-thio-guanosine.

[0341] In some embodiments, the nucleotide can be modified on the major groove face and can include replacing hydrogen on C-5 of uracil with a methyl group or a halo group. In specific embodiments, a modified nucleoside is 5′-O-(1-thiophosphate)-adenosine, 5′-O-(1-thiophosphate)-cytidine, 5′-O-(1-thiophosphate)-guanosine, 5′-O-(1-thiophosphate)-uridine or 5′-O-(1-thiophosphate)-pseudouridine.

[0342] In some embodiments, the modified artificial nucleic acid (RNA) molecule, of the invention may comprise nucleoside modifications selected from 6-aza-cytidine, 2-thio-cytidine, a-thio-cytidine, Pseudo-iso-cytidine, 5-aminoallyl-uridine, 5-iodo-uridine, N1-methyl-pseudouridine, 5,6-dihydrouridine, a-thio-uridine, 4-thio-uridine, 6-aza-uridine, 5-hydroxy-uridine, deoxy-thymidine, 5-methyl-uridine, Pyrrolo-cytidine, inosine, a-thio-guanosine, 6-methyl-guanosine, 5-methyl-cytdine, 8-oxo-guanosine, 7-deaza-guanosine, N1-methyl-adenosine, 2-amino-6-Chloro-purine, N6-methyl-2-amino-purine, Pseudo-iso-cytidine, 6-Chloro-purine, N6-methyl-adenosine, a-thio-adenosine, 8-azido-adenosine, 7-deaza-adenosine.

[0343] In some embodiments, a modified artificial nucleic acid (RNA) molecule (or any other nucleic acid, in particular RNA, as defined herein) does not comprise any of the chemical modifications as described herein. Such modified artificial nucleic acids, may nevertheless comprise a lipid modification or a sequence modification as described below.

### Lipid Modifications

[0344] According to further embodiments, artificial nucleic acid molecules (RNAs) of the invention may contain at least one lipid modification.

[0345] Such a “lipid-modified” artificial nucleic acid molecule (RNA), of the invention typically comprises (i) an artificial nucleic acid molecule (RNA), as defined herein, (ii) at least one linker covalently linked to said artificial nucleic acid molecule (RNA), (iii) at least one lipid covalently linked to the respective linker.

[0346] Alternatively, the “lipid-modified” artificial nucleic acid molecule (RNA), may comprise at least one artificial nucleic acid molecule (RNA) and at least one (bifunctional) lipid covalently linked (without a linker) with said artificial nucleic acid molecule (RNA).

[0347] Alternatively, the “lipid-modified” artificial nucleic acid molecule (RNA) may comprise (i) an artificial nucleic acid molecule (RNA), (ii) at least one linker covalently linked to said artificial nucleic acid molecule (RNA), and (iii) at least one lipid covalently linked to the respective linker, and further (iv) at least one (bifunctional) lipid covalently linked (without a linker) to said artificial nucleic acid molecule (RNA).

[0348] In this context, it is particularly preferred that the lipid modification is present at the terminal ends of a linear artificial nucleic acid molecule (RNA).

### Sequence Modifications

[0349] According to preferred embodiments, the artificial nucleic acid molecule (RNA, preferably mRNA) of the invention, is “sequence-modified”, i.e. comprises at least one sequence modification as described below. Without wishing to be bound by specific theory, such sequence modifications may increase stability and/or enhance expression of the inventive artificial nucleic acid molecules (RNAs).

### G/C Content Modification

[0350] According to preferred embodiments, the artificial nucleic acid (RNA) molecule, more preferably mRNA, of the invention may be modified, and thus stabilized, by modifying its guanosine/cytosine (G/C) content, preferably by modifying the G/C content of the at least one coding sequence. In other words, the artificial nucleic acid molecule (RNA) may preferably be G/C modified, i.e. preferably comprise G/C modified (coding) sequence.

[0351] A “G/C-modified” nucleic acid (RNA) sequence typically refers to a nucleic acid (RNA) comprising a nucleic acid (RNA) sequence that is based on a modified wild-type nucleic acid (RNA) sequence and comprises an altered number of guanosine and/or cytosine nucleotides as compared to said wild-type nucleic acid (RNA) sequence. Such an altered number of G/C nucleotides may be generated by substituting codons containing adenosine or thymidine nucleotides by “synonymous” codons containing guanosine or cytosine nucleotides. Accordingly, the codon substitutions preferably do not alter the encoded amino acid residues, but exclusively alter the G/C content of the nucleic acid (RNA).

[0352] In a particularly preferred embodiment of the present invention, the G/C content of the coding sequence of the artificial nucleic acid molecule (RNA) of the invention is modified, particularly increased, compared to the G/C content of the coding sequence of the respective wild-type, i.e. unmodified nucleic acid (RNA). The amino acid sequence encoded by the inventive artificial nucleic acid molecule (RNA) is preferably not modified as compared to the amino acid sequence encoded by the respective wild-type nucleic acid (RNA).

[0353] The provision of “G/C modified” nucleic acid molecules (RNAs) is based on the finding that nuclei acid (RNA) sequences having an increased G (guanosine)/C (cytosine) content are generally more stable than nucleic acid (RNA) sequences having an increased A (adenosine)/U (uracil) content.

[0354] According to the invention, the codons of the inventive artificial nucleic acid molecule (RNA) are therefore varied as compared to the respective wild-type nucleic acid (RNA), while retaining the translated amino acid sequence, such that they include an increased amount of G/C nucleotides.

[0355] In respect to the fact that several codons code for one and the same amino acid (so-called degeneration of the genetic code), the most favourable codons for the stability can be determined (so-called alternative codon usage). Depending on the amino acid to be encoded by the inventive artificial nucleic acid molecule (RNA), there are various possibilities for modification its nucleic acid sequence, compared to its wild-type sequence. In the case of amino acids, which are encoded by codons, which contain exclusively G or C nucleotides, no modification of the codon is necessary.

[0356] Thus, the codons for Pro (CCC or CCG), Arg (CGC or CGG), Ala (GCC or GCG) and Gly (GGC or GGG) require no modification, since no A or U is present. In contrast, codons which contain A and/or U nucleotides can be modified by substitution of other codons, which code for the same amino acids but contain no A and/or U. Examples of these are: the codons for Pro can be modified from CCU or CCA to CCC or CCG; the codons for Arg can be modified from CGU or CGA or AGA or AGG to CGC or CGG; the codons for Ala can be modified from GCU or GCA to GCC or GCG; the codons for Gly can be modified from GGU or GGA to GGC or GGG. In other cases, although A or U nucleotides cannot be eliminated from the codons, it is however possible to decrease the A and U content by using codons which contain a lower content of A and/or U nucleotides. Examples of these are: the codons for Phe can be modified from UUU to UUC; the codons for Leu can be modified from UUA, UUG, CUU or CUA to CUC or CUG; the codons for Ser can be modified from UCU or UCA or AGU to UCC, UCG or AGC; the codon for Tyr can be modified from UAU to UAC; the codon for Cys can be modified from UGU to UGC; the codon for His can be modified from CAU to CAC; the codon for Gln can be modified from CAA to CAG; the codons for Ile can be modified from AUU or AUA to AUC; the codons for Thr can be modified from ACU or ACA to ACC or ACG; the codon for Asn can be modified from AAU to AAC; the codon for Lys can be modified from AAA to AAG; the codons for Val can be modified from GUU or GUA to GUC or GUG; the codon for Asp can be modified from GAU to GAC; the codon for Glu can be modified from GAA to GAG; the stop codon UAA can be modified to UAG or UGA. In the case of the codons for Met (AUG) and Trp (UGG), on the other hand, there is no possibility of sequence modification. The substitutions listed above can be used either individually or in all possible combinations to increase the G/C content of the inventive artificial nucleic acid sequence, preferably RNA sequence (or any other nucleic acid sequence as defined herein) compared to its particular wild-type nucleic acid sequence (i.e. the original sequence). Thus, for example, all codons for Thr occurring in the wild-type sequence can be modified to ACC (or ACG). Preferably, however, for example, combinations of the above substitution possibilities are used:

substitution of all codons coding for Thr in the original sequence (wild-type RNA) to ACC (or ACG) and
substitution of all codons originally coding for Ser to UCC (or UCG or AGC); substitution of all codons coding for Ile in the original sequence to AUC and
substitution of all codons originally coding for Lys to AAG and
substitution of all codons originally coding for Tyr to UAC; substitution of all codons coding for Val in the original sequence to GUC (or GUG) and
substitution of all codons originally coding for Glu to GAG and
substitution of all codons originally coding for Ala to GCC (or GCG) and
substitution of all codons originally coding for Arg to CGC (or CGG); substitution of all codons coding for Val in the original sequence to GUC (or GUG) and
substitution of all codons originally coding for Glu to GAG and
substitution of all codons originally coding for Ala to GCC (or GCG) and
substitution of all codons originally coding for Gly to GGC (or GGG) and
substitution of all codons originally coding for Asn to AAC; substitution of all codons coding for Val in the original sequence to GUC (or GUG) and
substitution of all codons originally coding for Phe to UUC and
substitution of all codons originally coding for Cys to UGC and
substitution of all codons originally coding for Leu to CUG (or CUC) and
substitution of all codons originally coding for Gln to CAG and
substitution of all codons originally coding for Pro to CCC (or CCG); etc.

[0357] Preferably, the G/C content of the coding sequence of the artificial nucleic acid molecule (RNA) of the invention may be increased by at least 7%, more preferably by at least 15%, particularly preferably by at least 20%, compared to the G/C content of the coding sequence of the wild-type nucleic acid (RNA) coding for the same (poly-)peptide or protein of interest.

[0358] According to preferred embodiments, at least 5%, 10%, 20%, 30%, 40%, 50%, 60%, more preferably at least 70%, even more preferably at least 80% and most preferably at least 90%, 95% or even 100% of the substitutable codons in the region coding for a (poly-)peptide or protein of interest, or the whole sequence of the wild type nucleic acid (RNA) sequence may be substituted, thereby increasing the G/C content of the resulting “G/C modified” sequence.

[0359] In this context, it is particularly preferable to increase the G/C content of the artificial nucleic acid molecule (RNA), preferably of its at least one coding sequence, to the maximum (i.e. 100% of the substitutable codons) as compared to the wild-type nucleic acid (RNA) sequence.

### Substitution of Rare Codons

[0360] Another preferred modification of the artificial nucleic acid molecule (RNA) is based on the finding that the translation efficiency is also determined by a different frequency in the occurrence of tRNAs in cells. Thus, if so-called “rare codons” are present in the artificial nucleic acid molecule (RNA) to an increased extent, the corresponding modified nucleic acid (RNA) sequence is translated less effectively than a nucleic acid (RNA) sequence comprising codons coding for relatively “frequent” tRNAs.

[0361] In some preferred embodiments, in modified artificial nucleic acid molecules (RNAs) of the invention, the coding region is thus modified compared to the coding region of the corresponding wild-type nucleic acid (RNA), such that at least one codon of the wild-type sequence, which codes for a tRNA which is relatively rare in the cell, is exchanged for a codon, which codes for a tRNA which is relatively frequent in the cell and carries the same amino acid as the relatively rare tRNA.

[0362] Thereby, the sequences of the artificial nucleic acid molecule (RNA) of the invention is modified such that codons for which frequently occurring tRNAs are available are inserted.

[0363] Thereby, all codons of the wild-type nucleic acid (RNA) sequence, which code for a tRNA which is relatively rare in the cell, can in each case be exchanged for a codon, which codes for a tRNA which is relatively frequent in the cell and which, in each case, carries the same amino acid as the relatively rare tRNA. The frequency of specific tRNAs in the cell is well-known to the skilled person; cf. e.g. Akashi, Curr. Opin. Genet. Dev. 2001, 11(6): 660-666. Codons recruiting the most frequent tRNA for a given amino acid (e.g. Gly) in the (human) cell, are particularly preferred.

[0364] According to the invention, it is particularly preferable to combine a modified (preferably increased, more preferably maximized) G/C with the use of “frequent” codons as described above, without modifying the amino acid sequence encoded by the coding sequence of said artificial nucleic acid molecule (RNA). Such “combined” modifications preferably result in an increased translation efficacy and stabilization of the resulting, modified artificial nucleic acid molecule (RNA).

[0365] Modified artificial nucleic acid molecules (RNAs) exhibiting the sequence modifications described herein (e.g., increased G/C content and exchange of tRNAs) can be provided with the aid of computer programs as explained in WO 02/098443, the disclosure content of which is included in its full scope in the present invention. Using this computer program, the nucleotide sequence of any desired nucleic acid, in particular RNA, can be modified in silico obtain modified artificial nucleic acid molecules (RNAs) with a nucleic acid (RNA) sequence exhibiting a maximum G/C content in combination with codons recruiting frequent tRNAs, while encoding the same (non-modified) amino acid sequence as a respective wild-type nucleic acid (RNA) sequence.

[0366] Alternatively, it is also possible to modify either the G/C content or the codon usage individually as compared to a reference sequence. The source code in Visual Basic 6.0 (development environment used: Microsoft Visual Studio Enterprise 6.0 with Servicepack 3) is also described in WO 02/098443.

### A/U Content Modification

[0367] According to further preferred embodiments, the A/U content at or near the ribosome binding site of the artificial nucleic acid molecule (RNA) of the invention is increased compared to the A/U content at or near the ribosome binding site of a respective wild-type nucleic acid (RNA). Increasing the A/U content around the ribosome binding site may preferably enhance ribosomal binding efficacy. Effective ribosome binding the ribosome binding site (Kozak sequence) preferably facilitates efficient translation of the artificial nucleic acid molecule (RNA).

### DSE Modifications

[0368] According to further preferred embodiments, the artificial nucleic acid molecule (RNA) may be modified with respect to potentially destabilizing sequence elements. Particularly, the coding sequence and/or the 5′ and/or 3′ untranslated region of said artificial nucleic acid molecule (RNA) may be modified compared to the respective wild-type nucleic acid (RNA) by removing any destabilizing sequence elements (DSEs), while the encoded amino acid sequence of the modified artificial nucleic acid molecule (RNA) is preferably not being modified compared to its respective wild-type nucleic acid (RNA).

[0369] Eukaryotic RNAs may comprise destabilizing sequence elements (DSE), which may draw signal proteins mediating enzymatic degradation of the nucleic acid molecule (RNA) in vivo. Exemplary DSEs include AU-rich sequences (AURES), which occur in 3′-UTRs of numerous unstable RNAs (Caput et al., Proc. Natl. Acad. Sci. USA 1986, 83: 1670 to 1674). Also encompassed by the term are sequence motifs, which are recognized by possible endonucleases, e.g. the sequence GAACAAG, which is contained in the 3′-UTR segment of the gene encoding the transferrin receptor (Binder et al., EMBO J. 1994, 13: 1969 to 1980).

[0370] By removing or substantially removing such DSEs from the nucleic acid sequence of the artificial nucleic acid molecule (RNA) of the invention, in particular from its coding region and/or its 3′- and/or 5′-UTR elements, the artificial nucleic acid molecule (RNA) is preferably stabilized.

[0371] The artificial nucleic acid molecule (RNA) of the invention may therefore be modified as compared to a respective wild-type nucleic acid (RNA) such that said artificial nucleic acid molecule (RNA) is devoid of destabilizing sequence elements (DSEs).

### Sequences Adapted to Human Codon Usage:

[0372] A further preferred modification of the artificial nucleic acid (RNA) molecule of the invention is based on the finding that codons encoding the same amino acid typically occur at different frequencies.

[0373] According to further preferred embodiments, in the modified artificial nucleic acid molecule (RNA), the coding sequence is modified compared to the corresponding region of the respective wild-type nucleic acid (RNA) such that the frequency of the codons encoding the same amino acid corresponds to the naturally occurring frequency of that codon according to the human codon usage as e.g. shown in Table 2.

[0374] For example, the coding sequence of a wild-type nucleic acid molecule (RNA) may be adapted in a way that the codon “GCC” (for Ala) is used with a frequency of 0.40, the codon “GCT” (for Ala) is used with a frequency of 0.28, the codon “GCA” (for Ala) is used with a frequency of 0.22 and the codon “GCG” (for Ala) is used with a frequency of 0.10 etc. (see Table 2).

TABLE 2
Human codon usage table

| Amino acid | codon | fraction | /1000 |
|---|---|---|---|
| Ala | GCG | 0.10 | 7.4 |
| Ala | GCA | 0.22 | 15.8 |
| Ala | GCT | 0.28 | 18.5 |
| Ala | GCC* | 0.40 | 27.7 |
| Cys | TGT | 0.42 | 10.6 |
| Cys | TGC* | 0.58 | 12.6 |
| Asp | GAT | 0.44 | 21.8 |
| Asp | GAC* | 0.56 | 25.1 |
| Glu | GAG* | 0.59 | 39.6 |
| Glu | GAA | 0.41 | 29.0 |
| Phe | TTT | 0.43 | 17.6 |
| Phe | TTC* | 0.57 | 20.3 |
| Gly | GGG | 0.23 | 16.5 |
| Gly | GGA | 0.26 | 16.5 |
| Gly | GGT | 0.18 | 10.8 |
| Gly | GGC* | 0.33 | 22.2 |
| His | CAT | 0.41 | 10.9 |
| His | CAC* | 0.59 | 15.1 |
| Ile | ATA | 0.14 | 7.5 |
| Ile | ATT | 0.35 | 16.0 |
| Ile | ATC* | 0.52 | 20.8 |
| Lys | AAG* | 0.60 | 31.9 |
| Lys | AAA | 0.40 | 24.4 |
| Leu | TTG | 0.12 | 12.9 |
| Leu | TTA | 0.06 | 7.7 |
| Leu | CTG* | 0.43 | 39.6 |
| Leu | CTA | 0.07 | 7.2 |
| Leu | CTT | 0.12 | 13.2 |
| Leu | CTC | 0.20 | 19.6 |
| Met | ATG* | 1 | 22.0 |
| Asn | AAT | 0.44 | 17.0 |
| Asn | AAC* | 0.56 | 19.1 |
| Pro | CCG | 0.11 | 6.9 |
| Pro | CCA | 0.27 | 16.9 |
| Pro | CCT | 0.29 | 17.5 |
| Pro | CCC* | 0.33 | 19.8 |
| Gln | CAG* | 0.73 | 34.2 |
| Gln | CAA | 0.27 | 12.3 |
| Arg | AGG | 0.22 | 12.0 |
| Arg | AGA* | 0.21 | 12.1 |
| Arg | CGG | 0.19 | 11.4 |
| Arg | CGA | 0.10 | 6.2 |
| Arg | CGT | 0.09 | 4.5 |
| Arg | CGC | 0.19 | 10.4 |
| Ser | AGT | 0.14 | 12.1 |
| Ser | AGC* | 0.25 | 19.5 |
| Ser | TCG | 0.06 | 4.4 |
| Ser | TCA | 0.15 | 12.2 |
| Ser | TCT | 0.18 | 15.2 |
| Ser | TCC | 0.23 | 17.7 |
| Thr | ACG | 0.12 | 6.1 |
| Thr | ACA | 0.27 | 15.1 |
| Thr | ACT | 0.23 | 13.1 |
| Thr | ACC* | 0.38 | 18.9 |
| Val | GTG* | 0.48 | 28.1 |
| Val | GTA | 0.10 | 7.1 |
| Val | GTT | 0.17 | 11.0 |
| Val | GTC | 0.25 | 14.5 |
| Trp | TGG* | 1 | 13.2 |
| Tyr | TAT | 0.42 | 12.2 |
| Tyr | TAC* | 0.58 | 15.3 |
| Stop | TGA* | 0.61 | 1.6 |
| Stop | TAG | 0.17 | 0.8 |
| Stop | TAA | 0.22 | 1.0 |

*most frequent codon

### Codon-Optimized Sequences:

[0375] As described above, in preferred embodiments of the present invention, all codons of the wild-type nucleic acid sequence which code for a relatively rare tRNA may be exchanged for a codon which codes for a relatively frequent tRNA carrying the same amino acid as the relatively rare tRNA.

[0376] It is particularly preferred that the most frequent codons are used for each encoded amino acid (see Table 2, most frequent codons are marked with asterisks). Such an optimization procedure increases the codon adaptation index (CAI) and ultimately maximises the CAI. In the context of the invention, nucleic acid (RNA) sequences with increased or maximized CAI are typically referred to as “codon-optimized” and/or “CAI increased” and/or “maximized” nucleic acid (RNA) sequences. According to preferred embodiments, the artificial nucleic acid molecule (RNA) of the invention comprises at least one coding sequence, wherein the coding sequence is “codon-optimized” as described herein. More preferably, the codon adaptation index (CAI) of the at least one coding sequence may be at least 0.5, at least 0.8, at least 0.9 or at least 0.95. Most preferably, the codon adaptation index (CAI) of the at least one coding sequence may be 1.

[0377] For example, the coding sequence of a wild-type nucleic acid molecule (RNA) may be adapted in a way that the most frequent (human) codon is always used for each encoded amino acid, e.g. “GCC” for Ala or “TGC” for Cys.

### C-Optimized Sequences:

[0378] According to preferred embodiments, the artificial nucleic acid molecule (RNA) is modified by altering, preferably increasing, the cytosine (C) content of its nucleic acid (RNA) sequence, in particular in its at least one coding sequence.

[0379] In preferred embodiments, the C content of the coding sequence of the artificial nucleic acid molecule (RNA) of the invention is modified, preferably increased, compared to the C content of the coding sequence of the respective wild-type (unmodified) nucleic acid (RNA). The amino acid sequence encoded by the at least one coding sequence of the artificial nucleic acid molecule (RNA) of the invention is preferably not modified as compared to the amino acid sequence encoded by the respective wild-type nucleic acid (RNA).

[0380] In preferred embodiments, said modified artificial nucleic acid molecule (RNA) may be modified such that at least 10%, 20%, 30%, 40%, 50%, 60%, 70% or 80%, or at least 90% of the theoretically possible maximum cytosine-content or even a maximum cytosine-content is achieved.

[0381] In further preferred embodiments, at least 10%, 20%, 30%, 40%, 50%, 60%, 70%, 80%, 90% or even 100% of the codons of the wild-type nucleic acid (RNA) sequence, which are “cytosine content optimizable” are replaced by codons having a higher cytosine-content than the ones present in the wild type sequence.

[0382] In further preferred embodiments, some of the codons of the wild type coding sequence may additionally be modified such that a codon for a relatively rare tRNA in the cell is exchanged by a codon for a relatively frequent tRNA in the cell, provided that the substituted codon for a relatively frequent tRNA carries the same amino acid as the relatively rare tRNA of the original wild-type codon. Preferably, all of the codons for a relatively rare tRNA may be replaced by a codon for a relatively frequent tRNA in the cell, except codons encoding amino acids, which are exclusively encoded by codons not containing any cytosine, or except for glutamine (Gln), which is encoded by two codons each containing the same number of cytosines.

[0383] In further preferred embodiments of the present invention, the modified artificial nucleic acid molecule (RNA) may be modified such that at least 80%, or at least 90% of the theoretically possible maximum cytosine-content or even a maximum cytosine-content is achieved by means of codons, which code for relatively frequent tRNAs in the cell, wherein the amino acid sequence encoded by the at least one coding region remains unchanged.

[0384] Due to the natural degeneracy of the genetic code, more than one codon may encode a particular amino acid. Accordingly, 18 out of 20 naturally occurring amino acids are encoded by more than one codon (with Tryp and Met being an exception), e.g. by 2 codons (e.g. Cys, Asp, Glu), by three codons (e.g. Ile), by 4 codons (e.g. Al, Gly, Pro) or by 6 codons (e.g. Leu, Arg, Ser). However, not all codons encoding the same amino acid are utilized with the same frequency under in vivo conditions. Depending on each single organism, a typical codon usage profile is established.

[0385] The term “cytosine content-optimizable codon” refers to codons, which exhibit a lower content of cytosines than other codons encoding the same amino acid. Accordingly, any wild-type codon, which may be replaced by another codon encoding the same amino acid and exhibiting a higher number of cytosines within that codon, is considered to be cytosine-optimizable (C-optimizable). Any such substitution of a C-optimizable wild-type codon by the specific C-optimized codon within a wild type coding sequence increases its overall C-content and reflects a C-enriched modified nucleic acid (RNA) sequence.

[0386] According to some preferred embodiments, the artificial nucleic acid (RNA) molecule of the invention, and in particular its at least one coding sequence, comprises or consists of a C-maximized sequence containing C-optimized codons for all potentially C-optimizable codons. Accordingly, 100% or all of the theoretically replaceable C-optimizable codons may preferably be replaced by C-optimized codons over the entire length of the coding sequence.

[0387] In this context, cytosine-content optimizable codons are codons, which contain a lower number of cytosines than other codons coding for the same amino acid.

[0388] Any of the codons GCG, GCA, GCU codes for the amino acid Ala, which may be exchanged by the codon GCC encoding the same amino acid, and/or

the codon UGU that codes for Cys may be exchanged by the codon UGC encoding the same amino acid, and/or
the codon GAU which codes for Asp may be exchanged by the codon GAC encoding the same amino acid, and/or
the codon that UUU that codes for Phe may be exchanged for the codon UUC encoding the same amino acid, and/or
any of the codons GGG, GGA, GGU that code Gly may be exchanged by the codon GGC encoding the same amino acid, and/or
the codon CAU that codes for His may be exchanged by the codon CAC encoding the same amino acid, and/or
any of the codons AUA, AUU that code for Ile may be exchanged by the codon AUC, and/or
any of the codons UUG, UUA, CUG, CUA, CUU coding for Leu may be exchanged by the codon CUC encoding the same amino acid, and/or
the codon AAU that codes for Asn may be exchanged by the codon AAC encoding the same amino acid, and/or
any of the codons CCG, CCA, CCU coding for Pro may be exchanged by the codon CCC encoding the same amino acid, and/or
any of the codons AGG, AGA, CGG, CGA, CGU coding for Arg may be exchanged by the codon CGC encoding the same amino acid, and/or
any of the codons AGU, AGC, UCG, UCA, UCU coding for Ser may be exchanged by the codon UCC encoding the same amino acid, and/or
any of the codons ACG, ACA, ACU coding for Thr may be exchanged by the codon ACC encoding the same amino acid, and/or
any of the codons GUG, GUA, GUU coding for Val may be exchanged by the codon GUC encoding the same amino acid, and/or
the codon UAU coding for Tyr may be exchanged by the codon UAC encoding the same amino acid.

[0389] In any of the above instances, the number of cytosines is increased by 1 per exchanged codon. Exchange of all non C-optimized codons (corresponding to C-optimizable codons) of the coding sequence results in a “C-maximized” coding sequence. In the context of the invention, at least 70%, preferably at least 80%, more preferably at least 90%, of the non C-optimized codons within the at least one coding sequence of the artificial nucleic acid (RNA) molecule of the invention may be replaced by “C-optimized” codons.

[0390] It may be preferred that for some amino acids the percentage of C-optimizable codons replaced by C-optimized codons is less than 70%, while for other amino acids the percentage of replaced codons may be higher than 70% to meet the overall percentage of C-optimization of at least 70% of all C-optimizable wild type codons of the coding sequence.

[0391] Preferably, in a “C-optimized” artificial nucleic acid (RNA) molecule, at least 50% of the C-optimizable wild type codons for any given amino acid may be replaced by “C-optimized” codons, e.g. any modified C-enriched nucleic acid (RNA) molecule preferably contains at least 50% C-optimized codons at C-optimizable wild type codon positions encoding any one of the above mentioned amino acids Ala, Cys, Asp, Phe, Gly, His, Ile, Leu, Asn, Pro, Arg, Ser, Thr, Val and Tyr, preferably at least 60%.

[0392] In this context, codons encoding amino acids, which are not cytosine content-optimizable and which are, however, encoded by at least two codons, may be used without any further selection process. However, the codon of the wild type sequence that codes for a relatively rare tRNA in the cell, e.g. a human cell, may be exchanged for a codon that codes for a relatively frequent tRNA in the cell, wherein both code for the same amino acid.

[0393] Accordingly, the relatively rare codon GAA coding for Glu may be exchanged by the relative frequent codon GAG coding for the same amino acid, and/or

the relatively rare codon AAA coding for Lys may be exchanged by the relative frequent codon AAG coding for the same amino acid, and/or
the relatively rare codon CAA coding for Gln may be exchanged for the relative frequent codon CAG encoding the same amino acid.

[0394] In this context, the amino acids Met (AUG) and Trp (UGG), which are encoded by only one codon each, remain unchanged. Stop codons are not cytosine-content optimized, however, the relatively rare stop codons amber, ochre (UAA, UAG) may be exchanged by the relatively frequent stop codon opal (UGA).

[0395] The single substitutions listed above may be used individually as well as in all possible combinations in order to optimize the cytosine-content of the modified artificial nucleic acid molecule (RNA), compared to a respective wild-type nucleic acid (RNA) sequence.

[0396] Accordingly, the at least one coding sequence as defined herein may be modified compared to the coding sequence of the respective wild type nucleic acid (RNA) sequence, in such a way that codons are exchanged for C-optimized codons comprising additional cytosines and encoding the same amino acid, i.e. the encoded amino acid sequence is preferably not modified as compared to the encoded wild-type amino acid sequence.

[0397] According to particularly preferred embodiments, the inventive artificial nucleic acid (RNA) molecule comprises (in addition to the 5′ UTR and 3′ UTR element specified herein) at least one coding sequence as defined herein, wherein (a) the G/C content of the at least one coding sequence of said artificial nucleic acid (RNA) molecule is increased compared to the G/C content of the coding sequence of the corresponding wild-type nucleic acid (RNA), and/or (b) wherein the C content of the at least one coding sequence of said artificial nucleic acid molecule (RNA), is increased compared to the C content of the coding sequence of the corresponding wild-type nucleic acid (RNA), and/or (c) wherein the codons in the at least one coding sequence of said artificial nucleic acid (RNA) molecule are adapted to human codon usage, wherein the codon adaptation index (CAI) is preferably increased or maximized in the at least one coding sequence of said artificial nucleic acid (RNA) molecule, and wherein the amino acid sequence encoded by said artificial nucleic acid (RNA) molecule is preferably not being modified compared to the amino acid sequence encoded by the corresponding wild-type nucleic acid (RNA).

### Modified Nucleic Acid Sequences

[0398] The sequence modifications indicated above can in general be applied to any of the nucleic acid (RNA) sequences described herein, and are particularly envisaged to be applied to the coding sequences comprising or consisting of nucleic acid sequences encoding (poly-)peptides or proteins of interest as defined herein. The modifications (including chemical modifications, lipid modifications and sequence modifications) may, if suitable or necessary, be combined with each other in any combination, provided that the combined modifications do not interfere with each other, and preferably provided that the encoded (poly-)peptide or protein of interest is preferably functional, i.e. exhibits a desired biological property or exerts a desired biological function.

[0399] Accordingly, in preferred embodiments, artificial nucleic acid (RNA) molecules of the invention comprise at least one coding sequence encoding a (poly-)peptide or protein of interest, wherein said coding sequence has been modified as described above.

[0400] Therefore, in some preferred embodiments, artificial nucleic acid (RNA) molecules according to the invention comprise at least one 5′ UTR element as defined herein, at least one 3′ UTR element as defined herein and a coding sequence encoding a (poly-)peptide or protein of interest, wherein said artificial nucleic acid (RNA) molecule comprises or consists of a nucleic acid sequence according to SEQ ID NO: 50-368 or a variant, fragment or derivative of any one of said sequences, in particular a nucleic acid sequence having, in increasing order of preference, at least 5%, 10%, 20%, 30%, 40%, 50%, 60%, 70%, 80%, 85%, 86%, 87%, 88%, 89%, 90%, 91%, 92%, 93%, 94%, 95%, 96%, 97%, 98%, or 99%, preferably of at least 70%, more preferably of at least 80%, even more preferably at least 85%, even more preferably of at least 90% and most preferably of at least 95% or even 97%, sequence identity to any of these sequences.

### 5′ Cap

[0401] According to further preferred embodiments of the invention, a modified artificial nucleic acid (RNA) molecule, is modified by the addition of a so-called “5′-Cap”, which may preferably stabilize said artificial nucleic acid (RNA) molecule.

[0402] A “5′-Cap” is an entity, typically a modified nucleotide entity, which generally “caps” the 5′-end of a mature mRNA. A 5′-cap may typically be formed by a modified nucleotide, particularly by a derivative of a guanine nucleotide. Preferably, the 5′-cap is linked to the 5′-terminus via a 5′-5′-triphosphate linkage. A 5′-cap may be methylated, e.g. m7GpppN, wherein N is the terminal 5′ nucleotide of the nucleic acid carrying the 5′-cap, typically the 5′-end of an mRNA. m7GpppN is the 5′-cap structure, which naturally occurs in mRNA transcribed by polymerase II and is therefore preferably not considered a “modification” comprised in a modified mRNA in this context. Accordingly, a“modified” artificial nucleic acid (RNA) molecule (or any other nucleic acid, in particular RNA, as defined herein) may comprise a m7GpppN as 5′-cap, but additionally said modified artificial nucleic acid (RNA) molecule (or other nucleic acid) typically comprises at least one further modification as defined herein.

[0403] Further examples of 5′cap structures include glyceryl, inverted deoxy abasic residue (moiety), 4′, 5′ methylene nucleotide, 1-(beta-D-erythrofuranosyl) nucleotide, 4′-thio nucleotide, carbocyclic nucleotide, 1,5-anhydrohexitol nucleotide, L-nucleotides, alpha-nucleotide, modified base nucleotide, threo-pentofuranosyl nucleotide, acyclic 3′, 4′-seco nucleotide, acyclic 3,4-dihydroxybutyl nucleotide, acyclic 3,5 dihydroxypentyl nucleotide, 3′-3′-inverted nucleotide moiety, 3′-3′-inverted abasic moiety, 3′-2′-inverted nucleotide moiety, 3′-2′-inverted abasic moiety, 1,4-butanediol phosphate, 3′-phosphoramidate, hexylphosphate, aminohexyl phosphate, 3′-phosphate, 3′phosphorothioate, phosphorodithioate, or bridging or non-bridging methylphosphonate moiety. These modified 5′-cap structures are regarded as at least one modification in this context.

[0404] Particularly preferred modified 5′-cap structures are cap1 (methylation of the ribose of the adjacent nucleotide of m7G), cap2 (additional methylation of the ribose of the 2nd nucleotide downstream of the m7G), cap3 (additional methylation of the ribose of the 3rd nucleotide downstream of the m7G), cap4 (methylation of the ribose of the 4th nucleotide downstream of the m7G), ARCA (anti-reverse cap analogue, modified ARCA (e.g. phosphothioate modified ARCA), inosine, N1-methyl-guanosine, 2′-fluoro-guanosine, 7-deaza-guanosine, 8-oxo-guanosine, 2-amino-guanosine, LNA-guanosine, and 2-azido-guanosine.

[0405] According to preferred embodiments, the artificial nucleic acid comprises a methyl group at the 2′-O position of the ribose-2′-O position of the first nucleotide adjacent to the cap structure at the 5′ end of the RNA (cap-1). Typically, methylation may be accomplished by the action of Cap 2′-O-Methyltransferase, utilizing m7GpppN capped artificial nucleic acids (preferably RNA) as a substrate and S-adenosylmethionine (SAM) as a methyl donor to methylate capped RNA (cap-0) resulting in the cap-1 structure. The cap-1 structure has been reported to enhance mRNA translation efficiency and hence may help improving expression efficacy of the inventive artificial nucleic acid, preferably RNA, described herein.

### Poly(A)

[0406] According to further preferred embodiments, the artificial nucleic acid (RNA) molecule, of the invention may contain a poly(A) sequence.

[0407] The term “poly(A) sequence”, also called “poly(A) tail” or “3′-poly(A) tail” means a sequence of adenosine nucleotides, e.g., of up to about 400 adenosine nucleotides, e.g. from about 20 to about 400, preferably from about 50 to about 400, more preferably from about 50 to about 300, even more preferably from about 50 to about 250, most preferably from about 60 to about 250 adenosine nucleotides. As used herein, a “poly(A) sequence” may also comprise about 10 to 200 adenosine nucleotides, preferably about 10 to 100 adenosine nucleotides, more preferably about 40 to 80 adenosine nucleotides or even more preferably about 50 to 70 adenosine nucleotides. A “poly(A) sequence” is typically located at the 3′end of an RNA, in particular a mRNA.

[0408] Accordingly, in further preferred embodiments, the artificial nucleic acid (RNA) molecule, of the invention may contain at its 3′ terminus a poly(A) tail of typically about 10 to 200 adenosine nucleotides, preferably about 10 to 100 adenosine nucleotides, more preferably about 40 to 80 adenosine nucleotides or even more preferably about 50 to 70 adenosine nucleotides.

[0409] The poly(A) sequence in the artificial nucleic acid (RNA) molecule may preferably originate from a DNA template by RNA in vitro transcription. Alternatively, the poly(A) sequence may also be obtained in vitro by common methods of chemical-synthesis without being necessarily transcribed from a DNA template.

[0410] Moreover, “poly(A) sequences”, or “poly(A) tails” may be generated by enzymatic polyadenylation of the artificial nucleic acid (RNA) molecule using commercially available polyadenylation kits and corresponding protocols known in the art. Polyadenylation is typically understood to be the addition of a poly(A) sequence to a nucleic acid (RNA) molecule, e.g. to a premature mRNA. Polyadenylation may be induced by a so-called polyadenylation signal. This signal is preferably located within a stretch of nucleotides at the 3′-end of the nucleic acid (RNA) sequence to be polyadenylated. A polyadenylation signal typically comprises a hexamer consisting of adenine and uracil/thymine nucleotides, preferably the hexamer sequence AAUAAA. Other sequences, preferably hexamer sequences, are also conceivable. Polyadenylation may for instance occur during processing of a pre-mRNA (also called premature-mRNA). Typically, RNA maturation (from pre-mRNA to mature mRNA) comprises a step of polyadenylation.

[0411] Accordingly, the artificial nucleic acid (RNA) molecule of the invention may comprise a polyadenylation signal which conveys polyadenylation to a (transcribed) RNA by specific protein factors (e.g. cleavage and polyadenylation specificity factor (CPSF), cleavage stimulation factor (CstF), cleavage factors I and II (CF I and CF II), poly(A) polymerase (PAP)).

[0412] In this context, a consensus polyadenylation signal is preferred comprising the NN(U/T)ANA consensus sequence. In a particularly preferred aspect, the polyadenylation signal comprises one of the following sequences: AA(U/T)AAA or A(U/T)(U/T)AAA (wherein uridine is usually present in RNA and thymidine is usually present in DNA).

### Poly(C)

[0413] According to some embodiments, the artificial nucleic acid (RNA) molecule, may contain a poly(C) tail on the 3′ terminus of typically about 10 to 200 cytosine nucleotides, preferably about 10 to 100 cytosine nucleotides, more preferably about 20 to 70 cytosine nucleotides or even more preferably about 20 to 60 or even 10 to 40 cytosine nucleotides.

### Histone Stem-Loop (Histone SL or HSL)

[0414] According to some embodiments, the artificial nucleic acid (RNA) molecule may comprise a histone stem-loop sequence/structure. Such histone stem-loop sequences are preferably selected from histone stem-loop sequences as disclosed in WO 2012/019780, the disclosure of which is incorporated herewith by reference.

[0415] A histone stem-loop sequence, suitable to be used within the present invention, is preferably selected from at least one of the following formulae (I) or (II):

[chemical structure]

wherein:

| | |
|---|---|
| stem1 or stem2 bordering | is a consecutive sequence of 1 to 6, preferably of 2 to 6, more |
| elements N₁₋₆ | preferably of 2 to 5, even more preferably of 3 to 5, most preferably |
| | of 4 to 5 or 5N, wherein each N is independently from another selected |
| | from a nucleotide selected from A, U, T, G and C, or a nucleotide |
| | analogue thereof; |
| stem1 [N₀₋₂GN₃₋₅] | is reverse complementary or partially reverse complementary with |
| | element stem2, and is a consecutive sequence between of 5 to 7 |
| | nucleotides; |
| | wherein N₀₋₂ is a consecutive sequence of 0 to 2, preferably of 0 to 1, |
| | more preferably of 1N, wherein each N is independently from another |
| | selected from a nucleotide selected from A, U, T, G and C or a |
| | nucleotide analogue thereof; |
| | wherein N₃₋₅ is a consecutive sequence of 3 to 5, preferably of 4 to 5, |
| | more preferably of 4N, wherein each N is independently from another |
| | selected from a nucleotide selected from A, U, T, G and C or a |
| | nucleotide analogue thereof, and |
| | wherein G is guanosine or an analogue thereof, and may be optionally |
| | replaced by a cytidine or an analogue thereof, provided that its |
| | complementary nucleotide cytidine in stem2 is replaced by guanosine; |
| loop | is located between elements stem1 and stem2, and is a consecutive |
| sequence [N₀₋₄(U/T)N₀₋₄] | sequence of 3 to 5 nucleotides, more preferably of 4 nucleotides; |
| | wherein each N₀₋₄ is independent from another a consecutive |
| | sequence of 0 to 4, preferably of 1 to 3, more preferably of 1 to 2N, |
| | wherein each N is independently from another selected from a |
| | nucleotide selected from A, U, T, G and C or a nucleotide analogue |
| | thereof; and |
| | wherein U/T represents uridine, or optionally thymidine; |
| stem2 [N₃₋₅CN₀₋₂] | is reverse complementary or partially reverse complementary with |
| | element stem1, and is a consecutive sequence between of 5 to 7 |
| | nucleotides; |
| | wherein N₃₋₅ is a consecutive sequence of 3 to 5, preferably of 4 to 5, |
| | more preferably of 4N, wherein each N is independently from another |
| | selected from a nucleotide selected from A, U, T, G and C or a |
| | nucleotide analogue thereof; |
| | wherein N₀₋₂ is a consecutive sequence of 0 to 2, preferably of 0 to 1, |
| | more preferably of 1N, wherein each N is independently from another |
| | selected from a nucleotide selected from A, U, T, G or C or a nucleotide |
| | analogue thereof; and |
| | wherein C is cytidine or an analogue thereof, and may be optionally |
| | replaced by a guanosine or an analogue thereof provided that its |
| | complementary nucleoside guanosine in stem1 is replaced by cytidine; |

wherein
stem1 and stem2 are capable of base pairing with each other forming a reverse complementary sequence, wherein base pairing may occur between stem1 and stem2, e.g. by Watson-Crick base pairing of nucleotides A and U/T or G and C or by non-Watson-Crick base pairing e.g. wobble base pairing, reverse Watson-Crick base pairing, Hoogsteen base pairing, reverse Hoogsteen base pairing or are capable of base pairing with each other forming a partially reverse complementary sequence, wherein an incomplete base pairing may occur between stem1 and stem2, on the basis that one or more bases in one stem do not have a complementary base in the reverse complementary sequence of the other stem.

[0416] According to further embodiments, the artificial nucleic acid (RNA) molecule of the invention may comprise at least one histone stem-loop sequence according to at least one of the following specific formulae (Ia) or (IIa):

formula (Ia) (stem-loop sequence without stem bordering elements):

[chemical structure]

formula (IIa) (stem-loop sequence with stem bordering elements):

[chemical structure]

wherein:
N, C, G, T and U are as defined above.

[0417] According to further embodiments, the artificial nucleic acid (RNA) molecule of the invention may comprise at least one histone stem-loop sequence according to at least one of the following specific formulae (Ib) or (IIb):

formula (Ib) (stem-loop sequence without stem bordering elements):

[chemical structure]

formula (IIb) (stem-loop sequence with stem bordering elements):

[chemical structure]

wherein:
N, C, G, T and U are as defined above.

[0418] A particularly preferred histone stem-loop sequence is the sequence CAAAGGCTCTTTTCAGAGCCACCA (SEQ ID NO: 37) or more preferably the corresponding RNA sequence CAAAGGCUCUUUUCAGAGCCACCA (SEQ ID NO: 38).

### Constructs

[0419] The artificial nucleic acid (RNA) molecule of the invention, which comprises at least one 5′ UTR element, at least one 3′ UTR element and optionally at least one coding sequence as defined herein, may optionally further comprise at least one histone stem-loop, poly(A) and/or poly(C) sequence. The elements may occur therein in any order from 5′ to 3′ along the sequence of the artificial nucleic acid (RNA) molecule.

[0420] In addition, the artificial nucleic acid (RNA) molecule of the invention may comprise further elements as described herein, such as a stabilizing sequence as defined herein (e.g. derived from the UTR of a globin gene), IRES sequences, etc. Each of the elements may also be repeated in the artificial nucleic acid (RNA) molecule, of the invention at least once (particularly in di- or multicistronic constructs), e.g. twice or more. As an example, the individual elements may be present in the artificial nucleic acid (RNA) molecule, preferably RNA, of the invention in the following order:

5′-coding sequence-histone stem-loop-poly(A)/(C) sequence-3′; or
5′-coding sequence-poly(A)/(C) sequence-histone stem-loop-3′; or
5′-coding sequence-histone stem-loop-polyadenylation signal-3′; or
5′-coding sequence-polyadenylation signal-histone stem-loop-3′; or
5′-coding sequence-histone stem-loop-histone stem-loop-poly(A)/(C) sequence-3′; or
5′-coding sequence-histone stem-loop-histone stem-loop-polyadenylation signal-3′; or
5′-coding sequence-stabilizing sequence-poly(A)/(C) sequence-histone stem-loop-3′; or
5′-coding sequence-stabilizing sequence-poly(A)/(C) sequence-poly(A)/(C) sequence-histone stem-loop-3′; etc.

[0421] According to further embodiments, the artificial nucleic acid (RNA) molecule of the invention may optionally further comprises at least one of the following structural elements: a histone-stem-loop structure, preferably a histone-stem-loop in its 3′ untranslated region; a 5′-cap structure; a poly-A tail; and/or a poly(C) sequence.

[0422] Specifically, artificial nucleic acid (RNA) molecules of to the invention may comprise preferably in 5′ to 3′ direction, the following elements:
[0423] a) a 5′-CAP structure, preferably m7GpppN or Cap1
[0424] b) a 5′-UTR element, which comprises or consists of a nucleic acid sequence, which is derived from a 5′-UTR as defined herein, preferably comprising a nucleic acid sequence corresponding to the nucleic acid sequence according to SEQ ID NO: 1-22 or a homolog, fragment or variant thereof;
[0425] c) at least one coding sequence as defined herein;
[0426] d) a 3′-UTR element, which comprises or consists of a nucleic acid sequence, which is derived from a 3′-UTR as defined herein, preferably comprising a nucleic acid sequence corresponding to the nucleic acid sequence according to SEQ ID NO: 23-36, or a homolog, a fragment or a variant thereof,
[0427] e) optionally a poly(A) tail, preferably consisting of 10 to 1000, 10 to 500, 10 to 300 10 to 200, 10 to 100, 40 to 80 or 50 to 70 adenosine nucleotides,
[0428] f) optionally a poly(C) tail, preferably consisting of 10 to 200, 10 to 100, 20 to 70, 20 to 60 or 10 to 40 cytosine nucleotides, and
[0429] g) optionally a histone stem-loop.

[0430] Preferred artificial nucleic acid constructs are discussed in detail below.

### HSD17B4-Derived 5′ UTR Element and PSMB3-Derived 3′ UTR Element:

[0431] In some preferred embodiments, artificial nucleic acid (RNA) molecules of the invention comprise at least one 5′ UTR element derived from a 5′UTR of a HSD17B4 gene, or from a homolog, fragment, variant or derivative thereof and at least one 3′ UTR element derived from a 3′UTR of a GNAS gene, or from a homolog, fragment, variant or derivative thereof; wherein said artificial nucleic acid (RNA) molecule preferably comprises or consists of a nucleic acid sequence according to any one of SEQ ID NOs: 54-60, or a homolog, variant, fragment or derivative thereof, in particular a nucleic acid sequence having, in increasing order of preference, at least 5%, 10%, 20%, 30%, 40%, 50%, 60%, 70%, 80%, 85%, 86%, 87%, 88%, 89%, 90%, 91%, 92%, 93%, 94%, 95%, 96%, 97%, 98%, or 99%, preferably of at least 70%, more preferably of at least 80%, even more preferably at least 85%, even more preferably of at least 90% and most preferably of at least 95% or even 97%, sequence identity to any of these sequences.

### NDUFA4-Derived 5′ UTR Element and PSMB3-Derived 3′UTR Element:

[0432] In some preferred embodiments, artificial nucleic acid (RNA) molecules of the invention comprise at least one 5′ UTR element derived from a 5′UTR of a NDUFA4 gene, or from a homolog, fragment, variant or derivative thereof and at least one 3′ UTR element derived from a 3′UTR of a PSMB3 gene, or from a homolog, fragment, variant or derivative thereof; wherein said artificial nucleic acid (RNA) molecule preferably comprises or consists of a nucleic acid sequence according to any one of SEQ ID NOs: 188-193, or a homolog, variant, fragment or derivative thereof, in particular a nucleic acid sequence having, in increasing order of preference, at least 5%, 10%, 20%, 30%, 40%, 50%, 60%, 70%, 80%, 85%, 86%, 87%, 88%, 89%, 90%, 91%, 92%, 93%, 94%, 95%, 96%, 97%, 98%, or 99%, preferably of at least 70%, more preferably of at least 80%, even more preferably at least 85%, even more preferably of at least 90% and most preferably of at least 95% or even 97%, sequence identity to any of these sequences.

### SLC7A3-Derived 5′ UTR Element and PSMB3-Derived 3′ UTR Element:

[0433] In some preferred embodiments, artificial nucleic acid (RNA) molecules of the invention comprise at least one 5′ UTR element derived from a 5′UTR of a SLC7A3 gene, or from a homolog, fragment, variant or derivative thereof and at least one 3′ UTR element derived from a 3′UTR of a PSMB3 gene, or from a homolog, fragment, variant or derivative thereof; wherein said artificial nucleic acid (RNA) molecule preferably comprises or consists of a nucleic acid sequence according to any one of SEQ ID NOs: 313-319, or a homolog, variant, fragment or derivative thereof, in particular a nucleic acid sequence having, in increasing order of preference, at least 5%, 10%, 20%, 30%, 40%, 50%, 60%, 70%, 80%, 85%, 86%, 87%, 88%, 89%, 90%, 91%, 92%, 93%, 94%, 95%, 96%, 97%, 98%, or 99%, preferably of at least 70%, more preferably of at least 80%, even more preferably at least 85%, even more preferably of at least 90% and most preferably of at least 95% or even 97%, sequence identity to any of these sequences.

### NOSIP-Derived 5′ UTR Element and PSMB3-Derived 3′ UTR Element:

[0434] In some preferred embodiments, artificial nucleic acid (RNA) molecules of the invention comprise at least one 5′ UTR element derived from a 5′UTR of a NOSIP gene, or from a homolog, fragment, variant or derivative thereof and at least one 3′ UTR element derived from a 3′UTR of a PSMB3 gene, or from a homolog, fragment, variant or derivative thereof; wherein said artificial nucleic acid (RNA) molecule preferably comprises or consists of a nucleic acid sequence according to any one of SEQ ID NOs: 229-235, or a homolog, variant, fragment or derivative thereof, in particular a nucleic acid sequence having, in increasing order of preference, at least 5%, 10%, 20%, 30%, 40%, 50%, 60%, 70%, 80%, 85%, 86%, 87%, 88%, 89%, 90%, 91%, 92%, 93%, 94%, 95%, 96%, 97%, 98%, or 99%, preferably of at least 70%, more preferably of at least 80%, even more preferably at least 85%, even more preferably of at least 90% and most preferably of at least 95% or even 97%, sequence identity to any of these sequences.

### NOSIP-Derived 5′ UTR Element and GNAS-Derived 3′ UTR Element:

[0435] In some preferred embodiments, artificial nucleic acid (RNA) molecules of the invention comprise at least one 5′ UTR element derived from a 5′UTR of a NOSIP gene, or from a homolog, fragment, variant or derivative thereof and at least one 3′ UTR element derived from a 3′UTR of a GNAS gene, or from a homolog, fragment, variant or derivative thereof; wherein said artificial nucleic acid (RNA) molecule preferably comprises or consists of a nucleic acid sequence according to any one of SEQ ID NOs: 250-256, or a homolog, variant, fragment or derivative thereof, in particular a nucleic acid sequence having, in increasing order of preference, at least 5%, 10%, 20%, 30%, 40%, 50%, 60%, 70%, 80%, 85%, 86%, 87%, 88%, 89%, 90%, 91%, 92%, 93%, 94%, 95%, 96%, 97%, 98%, or 99%, preferably of at least 70%, more preferably of at least 80%, even more preferably at least 85%, even more preferably of at least 90% and most preferably of at least 95% or even 97%, sequence identity to any of these sequences.

### MP68-Derived 5′ UTR Element and PSMB3-Derived 3′ UTR Element:

[0436] In some preferred embodiments, artificial nucleic acid (RNA) molecules of the invention comprise at least one 5′ UTR element derived from a 5′UTR of a MP68 gene, or from a homolog, fragment, variant or derivative thereof and at least one 3′ UTR element derived from a 3′UTR of a PSMB3 gene, or from a homolog, fragment, variant or derivative thereof; wherein said artificial nucleic acid (RNA) molecule preferably comprises or consists of a nucleic acid sequence according to any one of SEQ ID NOs: 145-151, or a homolog, variant, fragment or derivative thereof, in particular a nucleic acid sequence having, in increasing order of preference, at least 5%, 10%, 20%, 30%, 40%, 50%, 60%, 70%, 80%, 85%, 86%, 87%, 88%, 89%, 90%, 91%, 92%, 93%, 94%, 95%, 96%, 97%, 98%, or 99%, preferably of at least 70%, more preferably of at least 80%, even more preferably at least 85%, even more preferably of at least 90% and most preferably of at least 95% or even 97%, sequence identity to any of these sequences.

### MP68-Derived 5′ UTR Element and CASP1-Derived 3′ UTR Element:

[0437] In some preferred embodiments, artificial nucleic acid (RNA) molecules of the invention comprise at least one 5′ UTR element derived from a 5′UTR of a MP68 gene, or from a homolog, fragment, variant or derivative thereof and at least one 3′ UTR element derived from a 3′UTR of a CASP1 gene, or from a homolog, fragment, variant or derivative thereof; wherein said artificial nucleic acid (RNA) molecule preferably comprises or consists of a nucleic acid sequence according to any one of SEQ ID NOs: 152-158, or a homolog, variant, fragment or derivative thereof, in particular a nucleic acid sequence having, in increasing order of preference, at least 5%, 10%, 20%, 30%, 40%, 50%, 60%, 70%, 80%, 85%, 86%, 87%, 88%, 89%, 90%, 91%, 92%, 93%, 94%, 95%, 96%, 97%, 98%, or 99%, preferably of at least 70%, more preferably of at least 80%, even more preferably at least 85%, even more preferably of at least 90% and most preferably of at least 95% or even 97%, sequence identity to any of these sequences.

### MP68-Derived 5′ UTR Element and GNAS-Derived 3′ UTR Element:

[0438] In some preferred embodiments, artificial nucleic acid (RNA) molecules of the invention comprise at least one 5′ UTR element derived from a 5′UTR of a MP68 gene, or from a homolog, fragment, variant or derivative thereof and at least one 3′ UTR element derived from a 3′UTR of a GNAS gene, or from a homolog, fragment, variant or derivative thereof; wherein said artificial nucleic acid (RNA) molecule preferably comprises or consists of a nucleic acid sequence according to any one of SEQ ID NOs: 166-172, or a homolog, variant, fragment or derivative thereof, in particular a nucleic acid sequence having, in increasing order of preference, at least 5%, 10%, 20%, 30%, 40%, 50%, 60%, 70%, 80%, 85%, 86%, 87%, 88%, 89%, 90%, 91%, 92%, 93%, 94%, 95%, 96%, 97%, 98%, or 99%, preferably of at least 70%, more preferably of at least 80%, even more preferably at least 85%, even more preferably of at least 90% and most preferably of at least 95% or even 97%, sequence identity to any of these sequences.

### UBQLN2-Derived 5′ UTR Element and RPS9-Derived 3′ UTR Element:

[0439] In some preferred embodiments, artificial nucleic acid (RNA) molecules of the invention comprise at least one 5′ UTR element derived from a 5′UTR of a UBQLN2 gene, or from a homolog, fragment, variant or derivative thereof and at least one 3′ UTR element derived from a 3′UTR of a RPS9 gene, or from a homolog, fragment, variant or derivative thereof; wherein said artificial nucleic acid (RNA) molecule preferably comprises or consists of a nucleic acid sequence according to any oen of SEQ ID NOs: 362-368, or a homolog, variant, fragment or derivative thereof, in particular a nucleic acid sequence having, in increasing order of preference, at least 5%, 10%, 20%, 30%, 40%, 50%, 60%, 70%, 80%, 85%, 86%, 87%, 88%, 89%, 90%, 91%, 92%, 93%, 94%, 95%, 96%, 97%, 98%, or 99%, preferably of at least 70%, more preferably of at least 80%, even more preferably at least 85%, even more preferably of at least 90% and most preferably of at least 95% or even 97%, sequence identity to any of these sequences.

### ASAH1-Derived 5′ UTR Element and RPS9-Derived 3′ UTR Element:

[0440] In some preferred embodiments, artificial nucleic acid (RNA) molecules of the invention comprise at least one 5′ UTR element derived from a 5′UTR of a ASAH1 gene, or from a homolog, fragment, variant or derivative thereof and at least one 3′ UTR element derived from a 3′UTR of a RPS9 gene, or from a homolog, fragment, variant or derivative thereof; wherein said artificial nucleic acid (RNA) molecule preferably comprises or consists of a nucleic acid sequence according to any one of SEQ ID NOs: 96-102, or a homolog, variant, fragment or derivative thereof, in particular a nucleic acid sequence having, in increasing order of preference, at least 5%, 10%, 20%, 30%, 40%, 50%, 60%, 70%, 80%, 85%, 86%, 87%, 88%, 89%, 90%, 91%, 92%, 93%, 94%, 95%, 96%, 97%, 98%, or 99%, preferably of at least 70%, more preferably of at least 80%, even more preferably at least 85%, even more preferably of at least 90% and most preferably of at least 95% or even 97%, sequence identity to any of these sequences.

### HSD17B4-Derived 5′ UTR Element and RPS9-Derived 3′ UTR Element:

[0441] In some preferred embodiments, artificial nucleic acid (RNA) molecules of the invention comprise at least one 5′ UTR element derived from a 5′UTR of a HSD17B4 gene, or from a homolog, fragment, variant or derivative thereof and at least one 3′ UTR element derived from a 3′UTR of a RPS9 gene, or from a homolog, fragment, variant or derivative thereof; wherein said artificial nucleic acid (RNA) molecule preferably comprises or consists of a nucleic acid sequence according to any one of SEQ ID NOs: 89-95, or a homolog, variant, fragment or derivative thereof, in particular a nucleic acid sequence having, in increasing order of preference, at least 5%, 10%, 20%, 30%, 40%, 50%, 60%, 70%, 80%, 85%, 86%, 87%, 88%, 89%, 90%, 91%, 92%, 93%, 94%, 95%, 96%, 97%, 98%, or 99%, preferably of at least 70%, more preferably of at least 80%, even more preferably at least 85%, even more preferably of at least 90% and most preferably of at least 95% or even 97%, sequence identity to any of these sequences.

### HSD17B4-Derived 5′ UTR Element and CASP1-Derived 3′ UTR Element:

[0442] In some preferred embodiments, artificial nucleic acid (RNA) molecules of the invention comprise at least one 5′ UTR element derived from a 5′UTR of a HSD17B4 gene, or from a homolog, fragment, variant or derivative thereof and at least one 3′ UTR element derived from a 3′UTR of a CASP1 gene, or from a homolog, fragment, variant or derivative thereof; wherein said artificial nucleic acid (RNA) molecule preferably comprises or consists of a nucleic acid sequence according to any one of SEQ ID NOs: 61-67, or a homolog, variant, fragment or derivative thereof, in particular a nucleic acid sequence having, in increasing order of preference, at least 5%, 10%, 20%, 30%, 40%, 50%, 60%, 70%, 80%, 85%, 86%, 87%, 88%, 89%, 90%, 91%, 92%, 93%, 94%, 95%, 96%, 97%, 98%, or 99%, preferably of at least 70%, more preferably of at least 80%, even more preferably at least 85%, even more preferably of at least 90% and most preferably of at least 95% or even 97%, sequence identity to any of these sequences.

### NOSIP-Derived 5′ UTR Element and COX6B1-Derived 3′ UTR Element:

[0443] In some preferred embodiments, artificial nucleic acid (RNA) molecules of the invention comprise at least one 5′ UTR element derived from a 5′UTR of a NOSIP gene, or from a homolog, fragment, variant or derivative thereof and at least one 3′ UTR element derived from a 3′UTR of a COX6B1 gene, or from a homolog, fragment, variant or derivative thereof; wherein said artificial nucleic acid (RNA) molecule preferably comprises or consists of a nucleic acid sequence according to any one of SEQ ID Nos: 243-249, or a homolog, variant, fragment or derivative thereof, in particular a nucleic acid sequence having, in increasing order of preference, at least 5%, 10%, 20%, 30%, 40%, 50%, 60%, 70%, 80%, 85%, 86%, 87%, 88%, 89%, 90%, 91%, 92%, 93%, 94%, 95%, 96%, 97%, 98%, or 99%, preferably of at least 70%, more preferably of at least 80%, even more preferably at least 85%, even more preferably of at least 90% and most preferably of at least 95% or even 97%, sequence identity to any of these sequences.

### NDUFA4-Derived 5′ UTR Element and RPS9-Derived 3′ UTR Element:

[0444] In some preferred embodiments, artificial nucleic acids according to the invention comprise at least one 5′ UTR element derived from a 5′UTR of a NDUFA4 gene, or from a homolog, fragment, variant or derivative thereof and at least one 3′ UTR element derived from a 3′UTR of a RPS9 gene, or from a homolog, fragment, variant or derivative thereof, wherein said artificial nucleic acid comprises or consists of a nucleic acid sequence according to any one of SEQ ID NOs: 222-228, or a homolog, variant, fragment or derivative thereof, in particular a nucleic acid sequence in having, in increasing order of preference, at least 5%, 10%, 20%, 30%, 40%, 50%, 60%, 70%, 80%, 85%, 86%, 87%, 88%, 89%, 90%, 91%, 92%, 93%, 94%, 95%, 96%, 97%, 98%, or 99%, preferably of at least 70%, more preferably of at least 80%, even more preferably at least 85%, even more preferably of at least 90% and most preferably of at least 95% or even 97%, sequence identity to any of these sequences.

### NOSIP-Derived 5′ UTR Element and NDUFA1-Derived 3′ UTR Element:

[0445] In some preferred embodiments, artificial nucleic acid (RNA) molecules of the invention comprise at least one 5′ UTR element derived from a 5′UTR of a NOSIP gene, or from a homolog, fragment, variant or derivative thereof and at least one 3′ UTR element derived from a 3′UTR of a NDUFA1 gene, or from a homolog, fragment, variant or derivative thereof; wherein said artificial nucleic acid (RNA) molecule preferably comprises or consists of a nucleic acid sequence according to any one of SEQ ID NOs: 257-263, or a homolog, variant, fragment or derivative thereof, in particular a nucleic acid sequence having, in increasing order of preference, at least 5%, 10%, 20%, 30%, 40%, 50%, 60%, 70%, 80%, 85%, 86%, 87%, 88%, 89%, 90%, 91%, 92%, 93%, 94%, 95%, 96%, 97%, 98%, or 99%, preferably of at least 70%, more preferably of at least 80%, even more preferably at least 85%, even more preferably of at least 90% and most preferably of at least 95% or even 97%, sequence identity to any of these sequences.

### NDUFA4-Derived 5′ UTR Element and COX6B1-Derived 3′ UTR Element:

[0446] In some preferred embodiments, artificial nucleic acid (RNA) molecules of the invention comprise at least one 5′ UTR element derived from a 5′UTR of a NDUFA4 gene, or from a homolog, fragment, variant or derivative thereof and at least one 3′ UTR element derived from a 3′UTR of a COX6B1 gene, or from a homolog, fragment, variant or derivative thereof; wherein said artificial nucleic acid (RNA) molecule preferably comprises or consists of a nucleic acid sequence according to any one of SEQ ID NOs: 201-207, or a homolog, variant, fragment or derivative thereof, in particular a nucleic acid sequence having, in increasing order of preference, at least 5%, 10%, 20%, 30%, 40%, 50%, 60%, 70%, 80%, 85%, 86%, 87%, 88%, 89%, 90%, 91%, 92%, 93%, 94%, 95%, 96%, 97%, 98%, or 99%, preferably of at least 70%, more preferably of at least 80%, even more preferably at least 85%, even more preferably of at least 90% and most preferably of at least 95% or even 97%, sequence identity to any of these sequences.

### NDUFA4-Derived 5′ UTR Element and NDUFA1-Derived 3′ UTR Element:

[0447] In some preferred embodiments, artificial nucleic acid (RNA) molecules of the invention comprise at least one 5′ UTR element derived from a 5′UTR of a NDUFA4 gene, or from a homolog, fragment, variant or derivative thereof and at least one 3′ UTR element derived from a 3′UTR of a NDUFA1 gene, or from a homolog, fragment, variant or derivative thereof; wherein said artificial nucleic acid (RNA) molecule preferably comprises or consists of a nucleic acid sequence according to any one of SEQ ID NOs: 215-221, or a homolog, variant, fragment or derivative thereof, in particular a nucleic acid sequence having, in increasing order of preference, at least 5%, 10%, 20%, 30%, 40%, 50%, 60%, 70%, 80%, 85%, 86%, 87%, 88%, 89%, 90%, 91%, 92%, 93%, 94%, 95%, 96%, 97%, 98%, or 99%, preferably of at least 70%, more preferably of at least 80%, even more preferably at least 85%, even more preferably of at least 90% and most preferably of at least 95% or even 97%, sequence identity to any of these sequences.

### ATP5A1-Derived 5′ UTR Element and CASP1-Derived 3′ UTR Element:

[0448] In some preferred embodiments, artificial nucleic acid (RNA) molecules of the invention comprise at least one 5′ UTR element derived from a 5′UTR of a ATP5A1 gene, or from a homolog, fragment, variant or derivative thereof and at least one 3′ UTR element derived from a 3′UTR of a CASP1 gene, or from a homolog, fragment, variant or derivative thereof; wherein said artificial nucleic acid (RNA) molecule preferably comprises or consists of a nucleic acid sequence according to any one of SEQ ID NOs: 110-116, or a homolog, variant, fragment or derivative thereof, in particular a nucleic acid sequence having, in increasing order of preference, at least 5%, 10%, 20%, 30%, 40%, 50%, 60%, 70%, 80%, 85%, 86%, 87%, 88%, 89%, 90%, 91%, 92%, 93%, 94%, 95%, 96%, 97%, 98%, or 99%, preferably of at least 70%, more preferably of at least 80%, even more preferably at least 85%, even more preferably of at least 90% and most preferably of at least 95% or even 97%, sequence identity to any of these sequences.

### SLC7A3-Derived 5′ UTR Element and GNAS-Derived 3′ UTR Element:

[0449] In some preferred embodiments, artificial nucleic acid (RNA) molecules of the invention comprise at least one 5′ UTR element derived from a 5′UTR of a SLC7A3 gene, or from a homolog, fragment, variant or derivative thereof and at least one 3′ UTR element derived from a 3′UTR of a GNAS gene, or from a homolog, fragment, variant or derivative thereof; wherein said artificial nucleic acid (RNA) molecule preferably comprises or consists of a nucleic acid sequence according to any one of SEQ ID NOs: 334-340, or a homolog, variant, fragment or derivative thereof, in particular a nucleic acid sequence having, in increasing order of preference, at least 5%, 10%, 20%, 30%, 40%, 50%, 60%, 70%, 80%, 85%, 86%, 87%, 88%, 89%, 90%, 91%, 92%, 93%, 94%, 95%, 96%, 97%, 98%, or 99%, preferably of at least 70%, more preferably of at least 80%, even more preferably at least 85%, even more preferably of at least 90% and most preferably of at least 95% or even 97%, sequence identity to any of these sequences.

### HSD17B4-Derived 5′ UTR Element and NDUFA1-Derived 3′ UTR Element:

[0450] In some preferred embodiments, artificial nucleic acid (RNA) molecules of the invention comprise at least one 5′ UTR element derived from a 5′UTR of a HSD17B4 gene, or from a homolog, fragment, variant or derivative thereof and at least one 3′ UTR element derived from a 3′UTR of a NDUFA1 gene, or from a homolog, fragment, variant or derivative thereof; wherein said artificial nucleic acid (RNA) molecule preferably comprises or consists of a nucleic acid sequence according to any one of SEQ ID NOs: 82-88, or a homolog, variant, fragment or derivative thereof, in particular a nucleic acid sequence having, in increasing order of preference, at least 5%, 10%, 20%, 30%, 40%, 50%, 60%, 70%, 80%, 85%, 86%, 87%, 88%, 89%, 90%, 91%, 92%, 93%, 94%, 95%, 96%, 97%, 98%, or 99%, preferably of at least 70%, more preferably of at least 80%, even more preferably at least 85%, even more preferably of at least 90% and most preferably of at least 95% or even 97%, sequence identity to any of these sequences.

### SLC7A3-Derived 5′ UTR Element and NDUFA1-Derived 3′ UTR Element:

[0451] In some preferred embodiments, artificial nucleic acid (RNA) molecules of the invention comprise at least one 5′ UTR element derived from a 5′UTR of a SLC7A3 gene, or from a homolog, fragment, variant or derivative thereof and at least one 3′ UTR element derived from a 3′UTR of a NDUFA1 gene, or from a homolog, fragment, variant or derivative thereof; wherein said artificial nucleic acid (RNA) molecule preferably comprises or consists of a nucleic acid sequence according to any one of SEQ ID NOs: 341-347, or a homolog, variant, fragment or derivative thereof, in particular a nucleic acid sequence having, in increasing order of preference, at least 5%, 10%, 20%, 30%, 40%, 50%, 60%, 70%, 80%, 85%, 86%, 87%, 88%, 89%, 90%, 91%, 92%, 93%, 94%, 95%, 96%, 97%, 98%, or 99%, preferably of at least 70%, more preferably of at least 80%, even more preferably at least 85%, even more preferably of at least 90% and most preferably of at least 95% or even 97%, sequence identity to any of these sequences.

### SLC7A3-Derived 5′ UTR Element and RPS9-Derived 3′ UTR Element:

[0452] In some preferred embodiments, artificial nucleic acid (RNA) molecules of the invention comprise at least one 5′ UTR element derived from a 5′UTR of a SLC7A3 gene, or from a homolog, fragment, variant or derivative thereof and at least one 3′ UTR element derived from a 3′UTR of a RPS9 gene, or from a homolog, fragment, variant or derivative thereof; wherein said artificial nucleic acid (RNA) molecule preferably comprises or consists of a nucleic acid sequence according to any one of SEQ ID NOs: 348-354, or a homolog, variant, fragment or derivative thereof, in particular a nucleic acid sequence having, in increasing order of preference, at least 5%, 10%, 20%, 30%, 40%, 50%, 60%, 70%, 80%, 85%, 86%, 87%, 88%, 89%, 90%, 91%, 92%, 93%, 94%, 95%, 96%, 97%, 98%, or 99%, preferably of at least 70%, more preferably of at least 80%, even more preferably at least 85%, even more preferably of at least 90% and most preferably of at least 95% or even 97%, sequence identity to any of these sequences.

### TUBB4B-Derived 5′ UTR Element and RPS9-Derived 3′ UTR Element:

[0453] In some preferred embodiments, artificial nucleic acid (RNA) molecules of the invention comprise at least one 5′ UTR element derived from a 5′UTR of a TUBB4B gene, or from a homolog, fragment, variant or derivative thereof and at least one 3′ UTR element derived from a 3′UTR of a RPS9 gene, or from a homolog, fragment, variant or derivative thereof; wherein said artificial nucleic acid (RNA) molecule preferably comprises or consists of a nucleic acid sequence according to any one of SEQ ID NOs: 355-361, or a homolog, variant, fragment or derivative thereof, in particular a nucleic acid sequence having, in increasing order of preference, at least 5%, 10%, 20%, 30%, 40%, 50%, 60%, 70%, 80%, 85%, 86%, 87%, 88%, 89%, 90%, 91%, 92%, 93%, 94%, 95%, 96%, 97%, 98%, or 99%, preferably of at least 70%, more preferably of at least 80%, even more preferably at least 85%, even more preferably of at least 90% and most preferably of at least 95% or even 97%, sequence identity to any of these sequences.

### RPL31-Derived 5′ UTR Element and RPS9-Derived 3′ UTR Element:

[0454] In some preferred embodiments, artificial nucleic acid (RNA) molecules of the invention comprise at least one 5′ UTR element derived from a 5′UTR of a RPL31 gene, or from a homolog, fragment, variant or derivative thereof and at least one 3′ UTR element derived from a 3′UTR of a RPS9 gene, or from a homolog, fragment, variant or derivative thereof; wherein said artificial nucleic acid (RNA) molecule preferably comprises or consists of a nucleic acid sequence according to any one of SEQ ID NOs: 306-312, or a homolog, variant, fragment or derivative thereof, in particular a nucleic acid sequence having, in increasing order of preference, at least 5%, 10%, 20%, 30%, 40%, 50%, 60%, 70%, 80%, 85%, 86%, 87%, 88%, 89%, 90%, 91%, 92%, 93%, 94%, 95%, 96%, 97%, 98%, or 99%, preferably of at least 70%, more preferably of at least 80%, even more preferably at least 85%, even more preferably of at least 90% and most preferably of at least 95% or even 97%, sequence identity to any of these sequences.

### MP68-Derived 5′ UTR Element and RPS9-Derived 3′ UTR Element:

[0455] In some preferred embodiments, artificial nucleic acid (RNA) molecules of the invention comprise at least one 5′ UTR element derived from a 5′UTR of a MP68 gene, or from a homolog, fragment, variant or derivative thereof and at least one 3′ UTR element derived from a 3′UTR of a RPS9 gene, or from a homolog, fragment, variant or derivative thereof; wherein said artificial nucleic acid (RNA) molecule preferably comprises or consists of a nucleic acid sequence according to any one of SEQ ID NOs: 180-187, or a homolog, variant, fragment or derivative thereof, in particular a nucleic acid sequence having, in increasing order of preference, at least 5%, 10%, 20%, 30%, 40%, 50%, 60%, 70%, 80%, 85%, 86%, 87%, 88%, 89%, 90%, 91%, 92%, 93%, 94%, 95%, 96%, 97%, 98%, or 99%, preferably of at least 70%, more preferably of at least 80%, even more preferably at least 85%, even more preferably of at least 90% and most preferably of at least 95% or even 97%, sequence identity to any of these sequences.

### NOSIP-Derived 5′ UTR Element and RPS9-Derived 3′ UTR Element:

[0456] In some preferred embodiments, artificial nucleic acid (RNA) molecules of the invention comprise at least one 5′ UTR element derived from a 5′UTR of a NOSIP gene, or from a homolog, fragment, variant or derivative thereof and at least one 3′ UTR element derived from a 3′UTR of a RPS9 gene, or from a homolog, fragment, variant or derivative thereof; wherein said artificial nucleic acid (RNA) molecule preferably comprises or consists of a nucleic acid sequence according to any one of SEQ ID NOs: 264-270, or a homolog, variant, fragment or derivative thereof, in particular a nucleic acid sequence having, in increasing order of preference, at least 5%, 10%, 20%, 30%, 40%, 50%, 60%, 70%, 80%, 85%, 86%, 87%, 88%, 89%, 90%, 91%, 92%, 93%, 94%, 95%, 96%, 97%, 98%, or 99%, preferably of at least 70%, more preferably of at least 80%, even more preferably at least 85%, even more preferably of at least 90% and most preferably of at least 95% or even 97%, sequence identity to any of these sequences.

### ATP5A1-Derived 5′ UTR Element and RPS9-Derived 3′ UTR Element:

[0457] In some preferred embodiments, artificial nucleic acid (RNA) molecules of the invention comprise at least one 5′ UTR element derived from a 5′UTR of a ATP5A1 gene, or from a homolog, fragment, variant or derivative thereof and at least one 3′ UTR element derived from a 3′UTR of a RPS9 gene, or from a homolog, fragment, variant or derivative thereof; wherein said artificial nucleic acid (RNA) molecule preferably comprises or consists of a nucleic acid sequence according to any one of SEQ ID NOs: 138-144, or a homolog, variant, fragment or derivative thereof, in particular a nucleic acid sequence having, in increasing order of preference, at least 5%, 10%, 20%, 30%, 40%, 50%, 60%, 70%, 80%, 85%, 86%, 87%, 88%, 89%, 90%, 91%, 92%, 93%, 94%, 95%, 96%, 97%, 98%, or 99%, preferably of at least 70%, more preferably of at least 80%, even more preferably at least 85%, even more preferably of at least 90% and most preferably of at least 95% or even 97%, sequence identity to any of these sequences.

### ATP5A1-Derived 5′ UTR Element and COX6B1-Derived 3′ UTR Element:

[0458] In some preferred embodiments, artificial nucleic acid (RNA) molecules of the invention comprise at least one 5′ UTR element derived from a 5′UTR of a ATP5A1 gene, or from a homolog, fragment, variant or derivative thereof and at least one 3′ UTR element derived from a 3′UTR of a COX6B1 gene, or from a homolog, fragment, variant or derivative thereof; wherein said artificial nucleic acid (RNA) molecule preferably comprises or consists of a nucleic acid sequence according to any one of SEQ ID NOs: 117-123, or a homolog, variant, fragment or derivative thereof, in particular a nucleic acid sequence having, in increasing order of preference, at least 5%, 10%, 20%, 30%, 40%, 50%, 60%, 70%, 80%, 85%, 86%, 87%, 88%, 89%, 90%, 91%, 92%, 93%, 94%, 95%, 96%, 97%, 98%, or 99%, preferably of at least 70%, more preferably of at least 80%, even more preferably at least 85%, even more preferably of at least 90% and most preferably of at least 95% or even 97%, sequence identity to any of these sequences.

### ATP5A1-Derived 5′ UTR Element and GNAS1-Derived 3′ UTR Element:

[0459] In some preferred embodiments, artificial nucleic acid (RNA) molecules of the invention comprise at least one 5′ UTR element derived from a 5′UTR of a ATP5A1 gene, or from a homolog, fragment, variant or derivative thereof and at least one 3′ UTR element derived from a 3′UTR of a GNAS1 gene, or from a homolog, fragment, variant or derivative thereof; wherein said artificial nucleic acid (RNA) molecule preferably comprises or consists of a nucleic acid sequence according to any one of SEQ ID NOs: 124-130, or a homolog, variant, fragment or derivative thereof, in particular a nucleic acid sequence having, in increasing order of preference, at least 5%, 10%, 20%, 30%, 40%, 50%, 60%, 70%, 80%, 85%, 86%, 87%, 88%, 89%, 90%, 91%, 92%, 93%, 94%, 95%, 96%, 97%, 98%, or 99%, preferably of at least 70%, more preferably of at least 80%, even more preferably at least 85%, even more preferably of at least 90% and most preferably of at least 95% or even 97%, sequence identity to any of these sequences.

### ATP5A1-Derived 5′ UTR Element and NDUFA1-Derived 3′ UTR Element:

[0460] In some preferred embodiments, artificial nucleic acid (RNA) molecules of the invention comprise at least one 5′ UTR element derived from a 5′UTR of a ATP5A1 gene, or from a homolog, fragment, variant or derivative thereof and at least one 3′ UTR element derived from a 3′UTR of a NDUFA1 gene, or from a homolog, fragment, variant or derivative thereof; wherein said artificial nucleic acid (RNA) molecule preferably comprises or consists of a nucleic acid sequence according to any one of SEQ ID NOs: 131-137, or a homolog, variant, fragment or derivative thereof, in particular a nucleic acid sequence having, in increasing order of preference, at least 5%, 10%, 20%, 30%, 40%, 50%, 60%, 70%, 80%, 85%, 86%, 87%, 88%, 89%, 90%, 91%, 92%, 93%, 94%, 95%, 96%, 97%, 98%, or 99%, preferably of at least 70%, more preferably of at least 80%, even more preferably at least 85%, even more preferably of at least 90% and most preferably of at least 95% or even 97%, sequence identity to any of these sequences.

### ATP5A1-Derived 5′ UTR Element and PSMB3-Derived 3′ UTR Element:

[0461] In some preferred embodiments, artificial nucleic acid (RNA) molecules of the invention comprise at least one 5′ UTR element derived from a 5′UTR of a ATP5A1 gene, or from a homolog, fragment, variant or derivative thereof and at least one 3′ UTR element derived from a 3′UTR of a PSMB3 gene, or from a homolog, fragment, variant or derivative thereof; wherein said artificial nucleic acid (RNA) molecule preferably comprises or consists of a nucleic acid sequence according to any one of SEQ ID NOs: 103-109, or a homolog, variant, fragment or derivative thereof, in particular a nucleic acid sequence having, in increasing order of preference, at least 5%, 10%, 20%, 30%, 40%, 50%, 60%, 70%, 80%, 85%, 86%, 87%, 88%, 89%, 90%, 91%, 92%, 93%, 94%, 95%, 96%, 97%, 98%, or 99%, preferably of at least 70%, more preferably of at least 80%, even more preferably at least 85%, even more preferably of at least 90% and most preferably of at least 95% or even 97%, sequence identity to any of these sequences.

### HSD17B4-Derived 5′ UTR Element and COX6B1-Derived 3′ UTR Element:

[0462] In some preferred embodiments, artificial nucleic acid (RNA) molecules of the invention comprise at least one 5′ UTR element derived from a 5′UTR of a HSD17B4 gene, or from a homolog, fragment, variant or derivative thereof and at least one 3′ UTR element derived from a 3′UTR of a COX6B1 gene, or from a homolog, fragment, variant or derivative thereof; wherein said artificial nucleic acid (RNA) molecule preferably comprises or consists of a nucleic acid sequence according to any one of SEQ ID NOs: 68-74, or a homolog, variant, fragment or derivative thereof, in particular a nucleic acid sequence having, in increasing order of preference, at least 5%, 10%, 20%, 30%, 40%, 50%, 60%, 70%, 80%, 85%, 86%, 87%, 88%, 89%, 90%, 91%, 92%, 93%, 94%, 95%, 96%, 97%, 98%, or 99%, preferably of at least 70%, more preferably of at least 80%, even more preferably at least 85%, even more preferably of at least 90% and most preferably of at least 95% or even 97%, sequence identity to any of these sequences.

### HSD17B4-Derived 5′ UTR Element and GNAS1-Derived 3′ UTR Element:

[0463] In some preferred embodiments, artificial nucleic acid (RNA) molecules of the invention comprise at least one 5′ UTR element derived from a 5′UTR of a HSD17B4 gene, or from a homolog, fragment, variant or derivative thereof and at least one 3′ UTR element derived from a 3′UTR of a GNAS1 gene, or from a homolog, fragment, variant or derivative thereof; wherein said artificial nucleic acid (RNA) molecule preferably comprises or consists of a nucleic acid sequence according to any one of SEQ ID NOs: 75-81, or a homolog, variant, fragment or derivative thereof, in particular a nucleic acid sequence having, in increasing order of preference, at least 5%, 10%, 20%, 30%, 40%, 50%, 60%, 70%, 80%, 85%, 86%, 87%, 88%, 89%, 90%, 91%, 92%, 93%, 94%, 95%, 96%, 97%, 98%, or 99%, preferably of at least 70%, more preferably of at least 80%, even more preferably at least 85%, even more preferably of at least 90% and most preferably of at least 95% or even 97%, sequence identity to any of these sequences.

### MP68-Derived 5′ UTR Element and COX6B1-Derived 3′ UTR Element:

[0464] In some preferred embodiments, artificial nucleic acid (RNA) molecules of the invention comprise at least one 5′ UTR element derived from a 5′UTR of a MP68 gene, or from a homolog, fragment, variant or derivative thereof and at least one 3′ UTR element derived from a 3′UTR of a COX6B1 gene, or from a homolog, fragment, variant or derivative thereof; wherein said artificial nucleic acid (RNA) molecule preferably comprises or consists of a nucleic acid sequence according to any one of SEQ ID NOs: 159-165, or a homolog, variant, fragment or derivative thereof, in particular a nucleic acid sequence having, in increasing order of preference, at least 5%, 10%, 20%, 30%, 40%, 50%, 60%, 70%, 80%, 85%, 86%, 87%, 88%, 89%, 90%, 91%, 92%, 93%, 94%, 95%, 96%, 97%, 98%, or 99%, preferably of at least 70%, more preferably of at least 80%, even more preferably at least 85%, even more preferably of at least 90% and most preferably of at least 95% or even 97%, sequence identity to any of these sequences.

### MP68-Derived 5′ UTR Element and NDUFA1-Derived 3′ UTR Element:

[0465] In some preferred embodiments, artificial nucleic acid (RNA) molecules of the invention comprise at least one 5′ UTR element derived from a 5′UTR of a MP68 gene, or from a homolog, fragment, variant or derivative thereof and at least one 3′ UTR element derived from a 3′UTR of a NDUFA1 gene, or from a homolog, fragment, variant or derivative thereof; wherein said artificial nucleic acid (RNA) molecule preferably comprises or consists of a nucleic acid sequence according to any one of SEQ ID NOs: 173-179, or a homolog, variant, fragment or derivative thereof, in particular a nucleic acid sequence having, in increasing order of preference, at least 5%, 10%, 20%, 30%, 40%, 50%, 60%, 70%, 80%, 85%, 86%, 87%, 88%, 89%, 90%, 91%, 92%, 93%, 94%, 95%, 96%, 97%, 98%, or 99%, preferably of at least 70%, more preferably of at least 80%, even more preferably at least 85%, even more preferably of at least 90% and most preferably of at least 95% or even 97%, sequence identity to any of these sequences.

### NDUFA4-Derived 5′ UTR Element and CASP1-Derived 3′ UTR Element:

[0466] In some preferred embodiments, artificial nucleic acid (RNA) molecules of the invention comprise at least one 5′ UTR element derived from a 5′UTR of a NDUFA4 gene, or from a homolog, fragment, variant or derivative thereof and at least one 3′ UTR element derived from a 3′UTR of a CASP1 gene, or from a homolog, fragment, variant or derivative thereof; wherein said artificial nucleic acid (RNA) molecule preferably comprises or consists of a nucleic acid sequence according to any one of SEQ ID NOs: 194-200, or a homolog, variant, fragment or derivative thereof, in particular a nucleic acid sequence having, in increasing order of preference, at least 5%, 10%, 20%, 30%, 40%, 50%, 60%, 70%, 80%, 85%, 86%, 87%, 88%, 89%, 90%, 91%, 92%, 93%, 94%, 95%, 96%, 97%, 98%, or 99%, preferably of at least 70%, more preferably of at least 80%, even more preferably at least 85%, even more preferably of at least 90% and most preferably of at least 95% or even 97%, sequence identity to any of these sequences.

### NDUFA4-Derived 5′ UTR Element and GNAS1-Derived 3′ UTR Element:

[0467] In some preferred embodiments, artificial nucleic acid (RNA) molecules of the invention comprise at least one 5′ UTR element derived from a 5′UTR of a NDUFA4 gene, or from a homolog, fragment, variant or derivative thereof and at least one 3′ UTR element derived from a 3′UTR of a GNAS1 gene, or from a homolog, fragment, variant or derivative thereof; wherein said artificial nucleic acid (RNA) molecule preferably comprises or consists of a nucleic acid sequence according to any one of SEQ ID NOs: 208-214, or a homolog, variant, fragment or derivative thereof, in particular a nucleic acid sequence having, in increasing order of preference, at least 5%, 10%, 20%, 30%, 40%, 50%, 60%, 70%, 80%, 85%, 86%, 87%, 88%, 89%, 90%, 91%, 92%, 93%, 94%, 95%, 96%, 97%, 98%, or 99%, preferably of at least 70%, more preferably of at least 80%, even more preferably at least 85%, even more preferably of at least 90% and most preferably of at least 95% or even 97%, sequence identity to any of these sequences.

### NOSIP-Derived 5′ UTR Element and CASP1-Derived 3′ UTR Element:

[0468] In some preferred embodiments, artificial nucleic acid (RNA) molecules of the invention comprise at least one 5′ UTR element derived from a 5′UTR of a NOSIP gene, or from a homolog, fragment, variant or derivative thereof and at least one 3′ UTR element derived from a 3′UTR of a CASP1 gene, or from a homolog, fragment, variant or derivative thereof; wherein said artificial nucleic acid (RNA) molecule preferably comprises or consists of a nucleic acid sequence according to any one of SEQ ID NOs: 236-242, or a homolog, variant, fragment or derivative thereof, in particular a nucleic acid sequence having, in increasing order of preference, at least 5%, 10%, 20%, 30%, 40%, 50%, 60%, 70%, 80%, 85%, 86%, 87%, 88%, 89%, 90%, 91%, 92%, 93%, 94%, 95%, 96%, 97%, 98%, or 99%, preferably of at least 70%, more preferably of at least 80%, even more preferably at least 85%, even more preferably of at least 90% and most preferably of at least 95% or even 97%, sequence identity to any of these sequences.

### RPL31-Derived 5′ UTR Element and CASP1-Derived 3′ UTR Element:

[0469] In some preferred embodiments, artificial nucleic acid (RNA) molecules of the invention comprise at least one 5′ UTR element derived from a 5′UTR of a RPL31 gene, or from a homolog, fragment, variant or derivative thereof and at least one 3′ UTR element derived from a 3′UTR of a CASP1 gene, or from a homolog, fragment, variant or derivative thereof; wherein said artificial nucleic acid (RNA) molecule preferably comprises or consists of a nucleic acid sequence according to any one of SEQ ID NOs: 278-284, or a homolog, variant, fragment or derivative thereof, in particular a nucleic acid sequence having, in increasing order of preference, at least 5%, 10%, 20%, 30%, 40%, 50%, 60%, 70%, 80%, 85%, 86%, 87%, 88%, 89%, 90%, 91%, 92%, 93%, 94%, 95%, 96%, 97%, 98%, or 99%, preferably of at least 70%, more preferably of at least 80%, even more preferably at least 85%, even more preferably of at least 90% and most preferably of at least 95% or even 97%, sequence identity to any of these sequences.

### RPL31-Derived 5′ UTR Element and COX6B1-Derived 3′ UTR Element:

[0470] In some preferred embodiments, artificial nucleic acid (RNA) molecules of the invention comprise at least one 5′ UTR element derived from a 5′UTR of a RPL31 gene, or from a homolog, fragment, variant or derivative thereof and at least one 3′ UTR element derived from a 3′UTR of a COX6B1 gene, or from a homolog, fragment, variant or derivative thereof; wherein said artificial nucleic acid (RNA) molecule preferably comprises or consists of a nucleic acid sequence according to any one of SEQ ID NOs: 285-291, or a homolog, variant, fragment or derivative thereof, in particular a nucleic acid sequence having, in increasing order of preference, at least 5%, 10%, 20%, 30%, 40%, 50%, 60%, 70%, 80%, 85%, 86%, 87%, 88%, 89%, 90%, 91%, 92%, 93%, 94%, 95%, 96%, 97%, 98%, or 99%, preferably of at least 70%, more preferably of at least 80%, even more preferably at least 85%, even more preferably of at least 90% and most preferably of at least 95% or even 97%, sequence identity to any of these sequences.

### RPL31-Derived 5′ UTR Element and GNAS1-Derived 3′ UTR Element:

[0471] In some preferred embodiments, artificial nucleic acid (RNA) molecules of the invention comprise at least one 5′ UTR element derived from a 5′UTR of a RPL31 gene, or from a homolog, fragment, variant or derivative thereof and at least one 3′ UTR element derived from a 3′UTR of a GNAS1 gene, or from a homolog, fragment, variant or derivative thereof; wherein said artificial nucleic acid (RNA) molecule preferably comprises or consists of a nucleic acid sequence according to any one fo SEQ ID NOs: 292-298, or a homolog, variant, fragment or derivative thereof, in particular a nucleic acid sequence having, in increasing order of preference, at least 5%, 10%, 20%, 30%, 40%, 50%, 60%, 70%, 80%, 85%, 86%, 87%, 88%, 89%, 90%, 91%, 92%, 93%, 94%, 95%, 96%, 97%, 98%, or 99%, preferably of at least 70%, more preferably of at least 80%, even more preferably at least 85%, even more preferably of at least 90% and most preferably of at least 95% or even 97%, sequence identity to any of these sequences.

### RPL31-Derived 5′ UTR Element and NDUFA1-Derived 3′ UTR Element:

[0472] In some preferred embodiments, artificial nucleic acid (RNA) molecules of the invention comprise at least one 5′ UTR element derived from a 5′UTR of a RPL31 gene, or from a homolog, fragment, variant or derivative thereof and at least one 3′ UTR element derived from a 3′UTR of a NDUFA1 gene, or from a homolog, fragment, variant or derivative thereof; wherein said artificial nucleic acid (RNA) molecule preferably comprises or consists of a nucleic acid sequence according to any one of SEQ ID NOs: 299-305, or a homolog, variant, fragment or derivative thereof, in particular a nucleic acid sequence having, in increasing order of preference, at least 5%, 10%, 20%, 30%, 40%, 50%, 60%, 70%, 80%, 85%, 86%, 87%, 88%, 89%, 90%, 91%, 92%, 93%, 94%, 95%, 96%, 97%, 98%, or 99%, preferably of at least 70%, more preferably of at least 80%, even more preferably at least 85%, even more preferably of at least 90% and most preferably of at least 95% or even 97%, sequence identity to any of these sequences.

### SLC7A3-Derived 5′ UTR Element and CASP1-Derived 3′ UTR Element:

[0473] In some preferred embodiments, artificial nucleic acid (RNA) molecules of the invention comprise at least one 5′ UTR element derived from a 5′UTR of a SLC7A3 gene, or from a homolog, fragment, variant or derivative thereof and at least one 3′ UTR element derived from a 3′UTR of a CASP1 gene, or from a homolog, fragment, variant or derivative thereof; wherein said artificial nucleic acid (RNA) molecule preferably comprises or consists of a nucleic acid sequence according to any one of SEQ ID NOs: 320-326, or a homolog, variant, fragment or derivative thereof, in particular a nucleic acid sequence having, in increasing order of preference, at least 5%, 10%, 20%, 30%, 40%, 50%, 60%, 70%, 80%, 85%, 86%, 87%, 88%, 89%, 90%, 91%, 92%, 93%, 94%, 95%, 96%, 97%, 98%, or 99%, preferably of at least 70%, more preferably of at least 80%, even more preferably at least 85%, even more preferably of at least 90% and most preferably of at least 95% or even 97%, sequence identity to any of these sequences.

### SLC7A3-Derived 5′ UTR Element and COX6B1-Derived 3′ UTR Element:

[0474] In some preferred embodiments, artificial nucleic acid (RNA) molecules of the invention comprise at least one 5′ UTR element derived from a 5′UTR of a SLC7A3 gene, or from a homolog, fragment, variant or derivative thereof and at least one 3′ UTR element derived from a 3′UTR of a COX6B1 gene, or from a homolog, fragment, variant or derivative thereof; wherein said artificial nucleic acid (RNA) molecule preferably comprises or consists of a nucleic acid sequence according to any one of SEQ ID NOs: 327-333, or a homolog, variant, fragment or derivative thereof, in particular a nucleic acid sequence having, in increasing order of preference, at least 5%, 10%, 20%, 30%, 40%, 50%, 60%, 70%, 80%, 85%, 86%, 87%, 88%, 89%, 90%, 91%, 92%, 93%, 94%, 95%, 96%, 97%, 98%, or 99%, preferably of at least 70%, more preferably of at least 80%, even more preferably at least 85%, even more preferably of at least 90% and most preferably of at least 95% or even 97%, sequence identity to any of these sequences.

### RPL31-Derived 5′ UTR Element and PSMB3-Derived 3′ UTR Element:

[0475] In some preferred embodiments, artificial nucleic acid (RNA) molecules of the invention comprise at least one 5′ UTR element derived from a 5′UTR of a RPL31 gene, or from a homolog, fragment, variant or derivative thereof and at least one 3′ UTR element derived from a 3′UTR of a PSMB3 gene, or from a homolog, fragment, variant or derivative thereof; wherein said artificial nucleic acid (RNA) molecule preferably comprises or consists of a nucleic acid sequence according to any one of SEQ ID NOs: 271-277, or a homolog, variant, fragment or derivative thereof, in particular a nucleic acid sequence having, in increasing order of preference, at least 5%, 10%, 20%, 30%, 40%, 50%, 60%, 70%, 80%, 85%, 86%, 87%, 88%, 89%, 90%, 91%, 92%, 93%, 94%, 95%, 96%, 97%, 98%, or 99%, preferably of at least 70%, more preferably of at least 80%, even more preferably at least 85%, even more preferably of at least 90% and most preferably of at least 95% or even 97%, sequence identity to any of these sequences.

### Complexation

[0476] In preferred embodiments, at least one artificial nucleic acid (RNA) molecule of the invention may be provided in a complexed form, i.e. complexed or associated with one or more (poly-)cationic compounds, preferably with (poly-)cationic polymers, (poly-)cationic peptides or proteins, e.g. protamine, (poly-)cationic polysaccharides and/or (poly-)cationic lipids. In this context, the terms “complexed” or “associated” refer to the essentially stable combination of the at least one artificial nucleic acid (RNA) molecule with one or more of the aforementioned compounds into larger complexes or assemblies, typically without covalent binding.

### Lipids

[0477] According to preferred embodiments, the artificial nucleic acid (RNA) molecule of the invention, is complexed or associated with lipids (in particular cationic and/or neutral lipids) to form one or more liposomes, lipoplexes, lipid nanoparticles, or nanoliposomes.

[0478] Therefore, in some embodiments, the artificial nucleic acid (RNA) molecule of the invention may be provided in the form of a lipid-based formulation, in particular in the form of liposomes, lipoplexes, and/or lipid nanoparticles comprising said artificial nucleic acid (RNA) molecule.

### Lipid Nanoparticles

[0479] According to some preferred embodiments, the artificial nucleic acid (RNA) molecule of the invention, is complexed or associated with lipids (in particular cationic and/or neutral lipids) to form one or more lipid nanoparticles.

[0480] Preferably, lipid nanoparticles (LNPs) may comprise: (a) at least one artificial nucleic acid (RNA) molecule of the invention, (b) a cationic lipid, (c) an aggregation reducing agent (such as polyethylene glycol (PEG) lipid or PEG-modified lipid), (d) optionally a non-cationic lipid (such as a neutral lipid), and (e) optionally, a sterol.

[0481] In some embodiments, LNPs may comprise, in addition to the at least one artificial nucleic acid (RNA) molecule of the invention, (i) at least one cationic lipid; (ii) a neutral lipid; (iii) a sterol, e.g., cholesterol; and (iv) a PEG-lipid, in a molar ratio of about 20-60% cationic lipid: 5-25% neutral lipid: 25-55% sterol; 0.5-15% PEG-lipid.

[0482] In some embodiments, the artificial nucleic acid (RNA) molecule of the invention may be formulated in an aminoalcohol lipidoid. Aminoalcohol lipidoids which may be used in the present invention may be prepared by the methods described in U.S. Pat. No. 8,450,298, herein incorporated by reference in its entirety.

### (i) Cationic Lipids

[0483] LNPs may include any cationic lipid suitable for forming a lipid nanoparticle. Preferably, the cationic lipid carries a net positive charge at about physiological pH.

[0484] The cationic lipid may be an amino lipid. As used herein, the term “amino lipid” is meant to include those lipids having one or two fatty acid or fatty alkyl chains and an amino head group (including an alkylamino or dialkylamino group) that may be protonated to form a cationic lipid at physiological pH.

[0485] The cationic lipid may be, for example, N,N-dioleyl-N,N-dimethylammonium chloride (DODAC), N,N-distearyl-N,N-dimethylammonium bromide (DDAB), 1,2-dioleoyltrimethyl ammonium propane chloride (DOTAP) (also known as N-(2,3-dioleoyloxy)propyl)-N,N,N-trimethylammonium chloride and 1,2-Dioleyloxy-3-trimethylaminopropane chloride salt), N-(1-(2,3-dioleyloxy)propyl)-N,N,N-trimethylammonium chloride (DOTMA), N,N-dimethyl-2,3-dioleyloxy)propylamine (DODMA), 1,2-DiLinoleyloxy-N,N-dimethylaminopropane (DLinDMA), 1,2-Dilinolenyloxy-N,N-dimethylaminopropane (DLenDMA), 1,2-di-y-linolenyloxy-N,N-dimethylaminopropane (γ-DLenDMA), 1,2-Dilinoleylcarbamoyloxy-3-dimethylaminopropane (DLin-C-DAP), 1,2-Dilinoleyoxy-3-(dimethylamino)acetoxypropane (DLin-DAC), 1,2-Dilinoleyoxy-3-morpholinopropane (DLin-MA), 1,2-Dilinoleoyl-3-dimethylaminopropane (DLinDAP), 1,2-Dilinoleylthio-3-dimethylaminopropane (DLin-S-DMA), 1-Linoleoyl-2-linoleyloxy-3-dimethylaminopropane (DLin-2-DMAP), 1,2-Dilinoleyloxy-3-trimethylaminopropane chloride salt (DLin-TMA.Cl), 1,2-Dilinoleoyl-3-trimethylaminopropane chloride salt (DLin-TAP.Cl), 1,2-Dilinoleyloxy-3-(N-methylpiperazino)propane (DLin-MPZ), or 3-(N,N-Dilinoleylamino)-1,2-propanediol (DLinAP), 3-(N,N-Dioleylamino)-1,2-propanedio (DOAP), 1,2-Dilinoleyloxo-3-(2-N,N-dimethylamino)ethoxypropane (DLin-EG-DMA), 2,2-Dilinoleyl-4-dimethylaminomethyl-[1,3]-dioxolane (DLin-K-DMA) or analogs thereof, (3aR,5s,6aS)—N,N-dimethyl-2,2-di((9Z,12Z)-octadeca-9,12-dienyl)tetrahydro-3aH-cyclopenta[d][1,3]dioxol-5-amine, (6Z,9Z,28Z,31Z)-heptatriaconta-6,9,28,31-tetraen-19-yl-4-dimethylamino)butanoate (MC3), 1,1′-(2-(4-(2-((2-(bis(2-hydroxydodecyl)amino)ethyl) (2-hydroxydodecyl)amino)ethyl)piperazin-1-yl) ethylazanediyl)didodecan-2-ol (C₁₂₋₂₀₀), 2,2-dilinoleyl-4-(2-dimethylaminoethyl)-[1,3]-dioxolane (DLin-K-C2-DMA), 2,2-dilinoleyl-4-dimethylaminomethyl-[1,3]-dioxolane (DLin-K-DMA), (6Z,9Z,28Z,31Z)-heptatriaconta-6,9,28,31-tetraen-19-yl-4-(dimethylamino)butanoate (DLin-M-C3-DMA), 3-((6Z,9Z,28Z,31Z)-heptatriaconta-6,9,28,3-1-tetraen-19-yloxy)-N,N-dimethylpropan-1-amine (MC3 Ether), 4-((6Z,9Z,28Z,31 Z)-heptatriaconta-6,9,28,31-tetraen-19-yloxy)-N,N-dimethylbutan-1-amine (MC4 Ether), or any combination of any of the foregoing.

[0486] Other suitable cationic lipids include, but are not limited to, N,N-distearyl-N,N-dimethylammonium bromide (DDAB), 3P—(N—(N′,N′-dimethylaminoethane)-carbamoyl)cholesterol (DC-Chol), N—(I-(2,3-dioleyloxy)propyl)-N-2-(sperminecarboxamido)ethyl)-N,N-dimethylammonium trifluoracetate (DOSPA), dioctadecylamidoglycyl carboxyspermine (DOGS), l,2-dileoyl-sn-3-phosphoethanolamine (DOPE), 1,2-dioleoyl-3-dimethylammonium propane (DODAP), N-(1,2-dimyristyloxyprop-3-yl)-N,N-dimethyl-N-hydroxyethyl ammonium bromide (DMRIE), and 2,2-Dilinoleyl-4-dimethylaminoethyl-[1,3]-dioxolane (XTC). Additionally, commercial preparations of cationic lipids can be used, such as, e.g., LIPOFECTIN (including DOTMA and DOPE, available from GIBCO/BRL), and LIPOFECTAMINE (comprising DOSPA and DOPE, available from GIBCO/BRL).

[0487] Other suitable cationic lipids are disclosed in International Publication Nos. WO 09/086558, WO 09/127060, WO 10/048536, WO 10/054406, WO 10/088537, WO 10/129709, and WO 2011/153493; U.S. Patent Publication Nos. 2011/0256175, 2012/0128760, and 2012/0027803; U.S. Pat. No. 8,158,601; and Love et al, PNAS, 107(5), 1864-69, 2010.

[0488] Other suitable amino lipids include those having alternative fatty acid groups and other dialkylamino groups, including those in which the alkyl substituents are different (e.g., N-ethyl-N-methylamino-, and N-propyl-N-ethylamino-). In general, amino lipids having less saturated acyl chains are more easily sized, particularly when the complexes must be sized below about 0.3 microns, for purposes of filter sterilization. Amino lipids containing unsaturated fatty acids with carbon chain lengths in the range of C₁₄ to C₂₂ may be used. Other scaffolds can also be used to separate the amino group and the fatty acid or fatty alkyl portion of the amino lipid.

[0489] In a further preferred embodiment, the LNP comprises the cationic lipid with formula (III) according to the patent application PCT/EP2017/064066. In this context, the disclosure of PCT/EP2017/064066 is also incorporated herein by reference.

[0490] In some embodiments, amino or cationic lipids have at least one protonatable or deprotonatable group, such that the lipid is positively charged at a pH at or below physiological pH (e.g. pH 7.4), and neutral at a second pH, preferably at or above physiological pH. It will, of course, be understood that the addition or removal of protons as a function of pH is an equilibrium process, and that the reference to a charged or a neutral lipid refers to the nature of the predominant species and does not require that all of the lipid be present in the charged or neutral form. Lipids that have more than one protonatable or deprotonatable group, or which are zwitterionic, are not excluded from use in the invention.

[0491] In some embodiments, the protonatable lipids have a pKa of the protonatable group in the range of about 4 to about 11, e.g., a pKa of about 5 to about 7.

[0492] LNPs may include two or more cationic lipids. The cationic lipids may be selected to contribute different advantageous properties. For example, cationic lipids that differ in properties such as amine pKa, chemical stability, half-life in circulation, half-life in tissue, net accumulation in tissue, or toxicity may be used in the LNP. In particular, the cationic lipids may be chosen so that the properties of the mixed-LNP are more desirable than the properties of a single-LNP of individual lipids.

[0493] In some embodiments, the cationic lipid is present in a ratio of from about 20 mol % to about 70 or 75 mol % or from about 45 to about 65 mol % or about 20, 25, 30, 35, 40, 45, 50, 55, 60, 65, or about 70 mol % of the total lipid present in the LNP. In further embodiments, the LNPs comprise from about 25% to about 75% on a molar basis of cationic lipid, e.g., from about 20 to about 70%, from about 35 to about 65%, from about 45 to about 65%, about 60%, about 50% or about 40% on a molar basis (based upon 100% total moles of lipid in the lipid nanoparticle). In some embodiments, the ratio of cationic lipid to nucleic acid is from about 3 to about 15, such as from about 5 to about 13 or from about 7 to about 11.

[0494] In some embodiments, the liposome may have a molar ratio of nitrogen atoms in the cationic lipid to the phosphates in the RNA (N:P ratio) of between 1:1 and 20:1 as described in International Publication No. WO 2013/006825 A1, herein incorporated by reference in its entirety. In other embodiments, the liposome may have an N:P ratio of greater than 20:1 or less than 1:1.

### (ii) Neutral and Non-Cationic Lipids

[0495] The “non-cationic lipid” may be a neutral lipid, an anionic lipid, or an amphipathic lipid.

[0496] Neutral lipids may be any of a number of lipid species which exist either in an uncharged or neutral zwitterionic form at physiological pH. Such lipids include, for example, diacylphosphatidylcholine, diacylphosphatidylethanolamine, ceramide, sphingomyelin, dihydrosphingomyelin, cephalin, and cerebrosides. The selection of neutral lipids for use in the LNPs described herein is generally guided by consideration of, e.g., LNP size and stability of the LNP in the bloodstream. Preferably, the neutral lipid may be a lipid having two acyl groups (e.g., diacylphosphatidylcholine and diacylphosphatidylethanolamine).

[0497] In some embodiments, the neutral lipids contain saturated fatty acids with carbon chain lengths in the range of C₁₀ to C₂₀. In other embodiments, neutral lipids with mono or diunsaturated fatty acids with carbon chain lengths in the range of C₁₀ to C₂₀ are used. Additionally, neutral lipids having mixtures of saturated and unsaturated fatty acid chains can be used.

[0498] Suitable neutral lipids include, but are not limited to, distearoylphosphatidylcholine (DSPC), dioleoylphosphatidylcholine (DOPC), dipalmitoylphosphatidylcholine (DPPC), dioleoylphosphatidylglycerol (DOPG), dipalmitoylphosphatidylglycerol (DPPG), dioleoyl-phosphatidylethanolamine (DOPE), palmitoyloleoylphosphatidylcholine (POPC), palmitoyloleoylphosphatidylethanolamine (POPE), dioleoyl-phosphatidylethanolamine 4-(N-maleimidomethyl)-cyclohexane-1-carboxylate (DOPE-mal), dipalmitoyl phosphatidyl ethanolamine (DPPE), dimyristoylphosphoethanolamine (DMPE), dimyristoyl phosphatidylcholine (DMPC), distearoyl-phosphatidyl-ethanolamine (DSPE), SM, 16-0-monomethyl PE, 16-O-dimethyl PE, 18-1-trans-PE, 1-stearoyl-2-oleoyl-phosphatidyethanolamine (SOPE), cholesterol, or a mixture thereof. Anionic lipids suitable for use in LNPs include, but are not limited to, phosphatidylglycerol, cardiolipin, diacylphosphatidylserine, diacylphosphatidic acid, N-dodecanoyl phosphatidylethanoloamine, N-succinyl phosphatidylethanolamine, N-glutaryl phosphatidylethanolamine, lysylphosphatidylglycerol, and other anionic modifying groups joined to neutral lipids.

[0499] “Amphipathic lipid” means any suitable material, wherein the hydrophobic portion of a lipid material orients into a hydrophobic phase, while the hydrophilic portion orients toward the aqueous phase. Such compounds include, but are not limited to, phospholipids, aminolipids, and sphingolipids. Representative phospholipids include sphingomyelin, phosphatidylcholine, phosphatidylethanolamine, phosphatidylserine, phosphatidylinositol, phosphatidic acid, palmitoyloleoyl phosphatdylcholine, lysophosphatidylcholine, lysophosphatidylethanolamine, dipalmitoylphosphatidylcholine, dioleoylphosphatidylcholine, distearoylphosphatidylcholine, or dilinoleoylphosphatidylcholine. Other phosphorus-lacking compounds, such as sphingolipids, glycosphingolipid families, diacylglycerols, and beta-acyloxyacids, can also be used.

[0500] In some embodiments, the non-cationic lipid may be present in a ratio of from about 5 mol % to about 90 mol %, about 5 mol % to about 10 mol %, about 5, 10, 15, 20, 25, 30, 35, 40, 45, 50, 55, 60, 65, 70, 75, 80, 85, or about 90 mol % of the total lipid present in the LNP.

[0501] In some embodiments, LNPs comprise from about 0% to about 15 or 45% on a molar basis of neutral lipid, e.g., from about 3 to about 12% or from about 5 to about 10%. For instance, LNPs may include about 15%, about 10%, about 7.5%, or about 7.1% of neutral lipid on a molar basis (based upon 100% total moles of lipid in the LNP).

(iii) Sterols

[0502] The sterol may preferably be cholesterol.

[0503] The sterol may be present in a ratio of about 10 mol % to about 60 mol % or about 25 mol % to about 40 mol % of the LNP. In some embodiments, the sterol is present in a ratio of about 10, 15, 20, 25, 30, 35, 40, 45, 50, 55, or about 60 mol % of the total lipid present in the LNP. In other embodiments, LNPs comprise from about 5% to about 50% on a molar basis of the sterol, e.g., about 15% to about 45%, about 20% to about 40%, about 48%, about 40%, about 38.5%, about 35%, about 34.4%, about 31.5% or about 31% on a molar basis (based upon 100% total moles of lipid in the LNP).

### (iv) Aggregation Reducing Agents

[0504] The aggregation reducing agent may be a lipid capable of reducing aggregation.

[0505] Examples of such lipids include, but are not limited to, polyethylene glycol (PEG)-modified lipids, monosialoganglioside Gml, and polyamide oligomers (PAO) such as those described in U.S. Pat. No. 6,320,017, which is incorporated by reference in its entirety. Other compounds with uncharged, hydrophilic, steric-barrier moieties, which prevent aggregation during formulation, like PEG, Gml or ATTA, can also be coupled to lipids. ATTA-lipids are described, e.g., in U.S. Pat. No. 6,320,017, and PEG-lipid conjugates are described, e.g., in U.S. Pat. Nos. 5,820,873, 5,534,499 and 5,885,613, each of which is incorporated by reference in its entirety.

[0506] The aggregation reducing agent may be, for example, selected from a polyethyleneglycol (PEG)-lipid including, without limitation, a PEG-diacylglycerol (DAG), a PEG-dialkylglycerol, a PEG-dialkyloxypropyl (DAA), a PEG-phospholipid, a PEG-ceramide (Cer), or a mixture thereof (such as PEG-Cerl4 or PEG-Cer20). The PEG-DAA conjugate may be, for example, a PEG-dilauryloxypropyl (C₁₂), a PEG-dimyristyloxypropyl (C14), a PEG-dipalmityloxypropyl (C₁₆), or a PEG-distearyloxypropyl (C₁₈). Other pegylated-lipids include, but are not limited to, polyethylene glycol-didimyristoyl glycerol (C₁₄-PEG or PEG-_{C14}, where PEG has an average molecular weight of 2000 Da) (PEG-DMG); (R)-2,3-bis(octadecyloxy)propyl-1-(methoxypoly(ethyleneglycol)2000)propylcarbamate) (PEG-DSG); PEG-carbamoyl-1,2-dimyristyloxypropylamine, in which PEG has an average molecular weight of 2000 Da (PEG-cDMA); N-Acetylgalactosamine-((R)-2,3-bis(octadecyloxy)propyl-1-(methoxypoly(ethyleneglycol)2000)propylcarbamate)) (GalNAc-PEG-DSG); mPEG (mw2000)-diastearoylphosphatidyl-ethanolamine (PEG-DSPE); and polyethylene glycol-dipalmitoylglycerol (PEG-DPG).

[0507] In some embodiments, the aggregation reducing agent is PEG-DMG. In other embodiments, the aggregation reducing agent is PEG-c-DMA.

[0508] In further preferred embodiments, the LNP comprises PEG-lipid alternatives, are PEG-less, and/or comprise phosphatidylcholine (PC) replacement lipids (e.g. oleic acid or analogs thereof).

[0509] In further preferred embodiments, the LNP comprises the aggregation reducing agent with formula (IV) according to the patent application PCT/EP2017/064066.

### LNP Composition

[0510] The composition of LNPs may be influenced by, inter alia, the selection of the cationic lipid component, the degree of cationic lipid saturation, the nature of the PEGylation, the ratio of all components and biophysical parameters such as its size. In one example by Semple et al. (Semple et al. Nature Biotech. 2010 28: 172-176; herein incorporated by reference in its entirety), the LNP composition was composed of 57.1% cationic lipid, 7.1% dipalmitoylphosphatidylcholine, 34.3% cholesterol, and 1.4% PEG-c-DMA (Basha et al. Mol Ther. 2011 19:2186-2200; herein incorporated by reference in its entirety).

[0511] In some embodiments, LNPs may comprise from about 35 to about 45% cationic lipid, from about 40% to about 50% cationic lipid, from about 50% to about 60% cationic lipid and/or from about 55% to about 65% cationic lipid. In some embodiments, the ratio of lipid to nucleic acid may range from about 5:1 to about 20:1, from about 10:1 to about 25:1, from about 15:1 to about 30:1 and/or at least 30:1.

[0512] The average molecular weight of the PEG moiety in the PEG-modified lipids can range from about 500 to about 8,000 Daltons (e.g., from about 1,000 to about 4,000 Daltons). In one preferred embodiment, the average molecular weight of the PEG moiety is about 2,000 Daltons.

[0513] The concentration of the aggregation reducing agent may range from about 0.1 to about 15 mol %, per 100% total moles of lipid in the LNP. In some embodiments, LNPs include less than about 3, 2, or 1 mole percent of PEG or PEG-modified lipid, based on the total moles of lipid in the LNP. In further embodiments, LNPs comprise from about 0.1% to about 20% of the PEG-modified lipid on a molar basis, e.g., about 0.5 to about 10%, about 0.5 to about 5%, about 10%, about 5%, about 3.5%, about 1.5%, about 0.5%, or about 0.3% on a molar basis (based on 100% total moles of lipids in the LNP).

[0514] Different LNPs having varying molar ratios of cationic lipid, non-cationic (or neutral) lipid, sterol (e.g., cholesterol), and aggregation reducing agent (such as a PEG-modified lipid) on a molar basis (based upon the total moles of lipid in the lipid nanoparticles) as depicted in Table 3 below. In preferred embodiments, the lipid nanoparticle formulation of the invention consists essentially of a lipid mixture in molar ratios of about 20-70% cationic lipid:5-45% neutral lipid:20-55% cholesterol, 0.5-15% PEG-modified lipid, more preferably in molar ratios of about 20-60% cationic lipid:5-25% neutral lipid:25-55% cholesterol:0.5-15% PEG-modified lipid.

TABLE 3
Lipid-based formulations

| | Molar ratio of Lipids | | | |
|---|---|---|---|---|
| | (based upon 100% total moles of lipid in the lipid nanoparticle) | | | |
| | | Non-Cationic | | Aggregation |
| | Cationic | (or Neutral) | | Reducing Agent |
| # | Lipid | Lipid | Sterol | (e.g., PEG-lipid) |
| 1 | from about 35% | from about 3% | from about 15% | from about 0.1% |
| | to about 65% | to about 12% | to about 45% | to about 10% |
| | | or 15% | | (preferably from |
| | | | | about 0.5% to |
| | | | | about 2% or 3% |
| 2 | from about 20% | from about 5% | from about 20% | from about 0.1% |
| | to about 70% | to about 45% | to about 55% | to about 10% |
| | | | | (preferably from |
| | | | | about 0.5% to |
| | | | | about 2% or 3% |
| 3 | from about 45% | from about 5% | from about 5% | from about 0.1% |
| | to about 65% | to about 10% | to about 45% | to about 3% |
| 4 | from about 20% | from about 5% | from about 25% | from about 0.1% |
| | to about 60% | to about 25% | to about 40% | to about 5% |
| | | | | (preferably from |
| | | | | about 0.1% to |
| | | | | about 3%) |
| 5 | about 40% | about 10% | from about 25% | about 10% |
| | | | to about 55% | |
| 6 | about 35% | about 15% | | about 10% |
| 7 | about 52% | about 13% | | about 5% |
| 8 | about 50% | about 10% | | about 1.5% |

[0515] In some embodiments, LNPs may occur as liposomes or lipoplexes as described in further detail below.

### LNP Size

[0516] In some embodiments, LNPs have a median diameter size of from about 50 nm to about 300 nm, such as from about 50 nm to about 250 nm, for example, from about 50 nm to about 200 nm.

[0517] In some embodiments, smaller LNPs may be used. Such particles may comprise a diameter from below 0.1 um up to 100 nm such as, but not limited to, less than 0.1 um, less than 1.0 um, less than 5 um, less than 10 um, less than 15 um, less than 20 um, less than 25 um, less than 30 um, less than 35 um, less than 40 um, less than 50 um, less than 55 um, less than 60 um, less than 65 um, less than 70 um, less than 75 um, less than 80 um, less than 85 um, less than 90 um, less than 95 um, less than 100 um, less than 125 um, less than 150 um, less than 175 um, less than 200 um, less than 225 um, less than 250 um, less than 275 um, less than 300 um, less than 325 um, less than 350 um, less than 375 um, less than 400 um, less than 425 um, less than 450 um, less than 475 um, less than 500 um, less than 525 um, less than 550 um, less than 575 um, less than 600 um, less than 625 um, less than 650 um, less than 675 um, less than 700 um, less than 725 um, less than 750 um, less than 775 um, less than 800 um, less than 825 um, less than 850 um, less than 875 um, less than 900 um, less than 925 um, less than 950 um, less than 975 um, In another embodiment, nucleic acids may be delivered using smaller LNPs which may comprise a diameter from about 1 nm to about 100 nm, from about 1 nm to about 10 nm, about 1 nm to about 20 nm, from about 1 nm to about 30 nm, from about 1 nm to about 40 nm, from about 1 nm to about 50 nm, from about 1 nm to about 60 nm, from about 1 nm to about 70 nm, from about 1 nm to about 80 nm, from about 1 nm to about 90 nm, from about 5 nm to about from 100 nm, from about 5 nm to about 10 nm, about 5 nm to about 20 nm, from about 5 nm to about 30 nm, from about 5 nm to about 40 nm, from about 5 nm to about 50 nm, from about 5 nm to about 60 nm, from about 5 nm to about 70 nm, from about 5 nm to about 80 nm, from about 5 nm to about 90 nm, about 10 to about 50 nM, from about 20 to about 50 nm, from about 30 to about 50 nm, from about 40 to about 50 nm, from about 20 to about 60 nm, from about 30 to about 60 nm, from about 40 to about 60 nm, from about 20 to about 70 nm, from about 30 to about 70 nm, from about 40 to about 70 nm, from about 50 to about 70 nm, from about 60 to about 70 nm, from about 20 to about 80 nm, from about 30 to about 80 nm, from about 40 to about 80 nm, from about 50 to about 80 nm, from about 60 to about 80 nm, from about 20 to about 90 nm, from about 30 to about 90 nm, from about 40 to about 90 nm, from about 50 to about 90 nm, from about 60 to about 90 nm and/or from about 70 to about 90 nm.

[0518] In some embodiments, the LNP have a diameter greater than 100 nm, greater than 150 nm, greater than 200 nm, greater than 250 nm, greater than 300 nm, greater than 350 nm, greater than 400 nm, greater than 450 nm, greater than 500 nm, greater than 550 nm, greater than 600 nm, greater than 650 nm, greater than 700 nm, greater than 750 nm, greater than 800 nm, greater than 850 nm, greater than 900 nm, greater than 950 nm or greater than 1000 nm.

[0519] In other embodiments, LNPs have a single mode particle size distribution (i.e., they are not bi- or poly-modal).

### Other Components

[0520] LNPs may further comprise one or more lipids and/or other components in addition to those mentioned above.

[0521] Other lipids may be included in the liposome compositions for a variety of purposes, such as to prevent lipid oxidation or to attach ligands onto the liposome surface. Any of a number of lipids may be present in LNPs, including amphipathic, neutral, cationic, and anionic lipids. Such lipids can be used alone or in combination.

[0522] Additional components that may be present in a LNP include bilayer stabilizing components such as polyamide oligomers (see, e.g., U.S. Pat. No. 6,320,017, which is incorporated by reference in its entirety), peptides, proteins, and detergents.

### Liposomes

[0523] In some embodiments, artificial nucleic acid (RNA) molecules of the invention are formulated as liposomes.

[0524] Cationic lipid-based liposomes are able to complex with negatively charged nucleic acids (e.g. RNAs) via electrostatic interactions, resulting in complexes that offer biocompatibility, low toxicity, and the possibility of the large-scale production required for in vivo clinical applications. Liposomes can fuse with the plasma membrane for uptake; once inside the cell, the liposomes are processed via the endocytic pathway and the nucleic acid is then released from the endosome/carrier into the cytoplasm. Liposomes have long been perceived as drug delivery vehicles because of their superior biocompatibility, given that liposomes are basically analogs of biological membranes, and can be prepared from both natural and synthetic phospholipids (Int J Nanomedicine. 2014; 9: 1833-1843).

[0525] Liposomes may typically consist of a lipid bilayer that can be composed of cationic, anionic, or neutral (phospho)lipids and cholesterol, which encloses an aqueous core. Both the lipid bilayer and the aqueous space can incorporate hydrophobic or hydrophilic compounds, respectively. Liposomes may have one or more lipid membranes. Liposomes may be single-layered, referred to as unilamellar, or multi-layered, referred to as multilamellar.

[0526] Liposome characteristics and behaviour in vivo can be modified by addition of a hydrophilic polymer coating, e.g. polyethylene glycol (PEG), to the liposome surface to confer steric stabilization. Furthermore, liposomes may be used for specific targeting by attaching ligands (e.g., antibodies, peptides, and carbohydrates) to its surface or to the terminal end of the attached PEG chains (Front Pharmacol. 2015 Dec. 1; 6:286).

[0527] Liposomes may typically present as spherical vesicles and may range in size from 20 nm to a few microns.

[0528] Liposomes may be of different sizes such as, but not limited to, a multilamellar vesicle (MLV) which may be hundreds of nanometers in diameter and may contain a series of concentric bilayers separated by narrow aqueous compartments, a small unicellular vesicle (SUV) which may be smaller than 50 nm in diameter, and a large unilamellar vesicle (LUV) which may be between 50 and 500 nm in diameter. Liposome design may include, but is not limited to, opsonins or ligands in order to improve the attachment of liposomes to unhealthy tissue or to activate events such as, but not limited to, endocytosis. Liposomes may contain a low or a high pH in order to improve the delivery of the pharmaceutical formulations.

[0529] As a non-limiting example, liposomes such as synthetic membrane vesicles may be prepared by the methods, apparatus and devices described in US Patent Publication No. US20130177638, US20130177637, US20130177636, US20130177635, US20130177634, US20130177633, US20130183375, US20130183373 and US20130183372, the contents of each of which are herein incorporated by reference in its entirety. At least one artificial nucleic acid (RNA) molecule of the invention may be encapsulated by the liposome and/or may be contained in an aqueous core which may then be encapsulated by the liposome (see International Pub. Nos. WO2012031046, WO2012031043, WO2012030901 and WO2012006378 and US Patent Publication No. US20130189351, US20130195969 and US20130202684; the contents of each of which are herein incorporated by reference in their entirety).

[0530] In some embodiments, the artificial nucleic acid (RNA) molecule of the invention may be formulated in liposomes such as, but not limited to, DiLa2 liposomes (Marina Biotech, Bothell, Wash.), SMARTICLES® (Marina Biotech, Bothell, Wash.), neutral DOPC (l,2-dioleoyl-sn-glycero-3-phosphocholine) based liposomes (e.g., siRNA delivery for ovarian cancer (Landen et al. Cancer Biology & Therapy 2006 5(12)1708-1713); herein incorporated by reference in its entirety) and hyaluronan-coated liposomes (Quiet Therapeutics, Israel).

### Lipoplexes

[0531] In some embodiments, artificial nucleic acid (RNA) molecules of the invention are formulated as lipoplexes, i.e. cationic lipid bilayers sandwiched between nucleic acid layers.

[0532] Cationic lipids, such as DOTAP, (1,2-dioleoyl-3-trimethylammonium-propane) and DOTMA (N-[1-(2,3-dioleoyloxy)propyl]-N,N,N-trimethyl-ammonium methyl sulfate) can form complexes or lipoplexes with negatively charged nucleic acids to form nanoparticles by electrostatic interaction, providing high in vitro transfection efficiency.

### Nanoliposomes

[0533] In some embodiments, artificial nucleic acid (RNA) molecules of the invention are formulated as neutral lipid-based nanoliposomes such as 1,2-dioleoyl-sn-glycero-3-phosphatidylcholine (DOPC)-based nanoliposomes (Adv Drug Deliv Rev. 2014 February; 66: 110-116.).

### Emulsions

[0534] In some embodiments, artificial nucleic acid (RNA) molecules of the invention are formulated as emulsions. In another embodiment, said artificial nucleic acid (RNA) molecules are formulated in a cationic oil-in-water emulsion where the emulsion particle comprises an oil core and a cationic lipid which can interact with the nucleic acid(s) anchoring the molecule to the emulsion particle (see International Pub. No. WO2012006380; herein incorporated by reference in its entirety). In some embodiments, said artificial nucleic acid (RNA) molecules are formulated in a water-in-oil emulsion comprising a continuous hydrophobic phase in which the hydrophilic phase is dispersed. As a non-limiting example, the emulsion may be made by the methods described in International Publication No. WO201087791, the contents of which are herein incorporated by reference in its entirety.

### (Poly-)Cationic Compounds and Carriers

[0535] In preferred embodiments, artificial nucleic acid (RNA) molecules of the invention are complexed or associated with a cationic or polycationic compound (“(poly-)cationic compound”) and/or a polymeric carrier.

[0536] The term “(poly-)cationic compound” typically refers to a charged molecule, which is positively charged (cation) at a pH value typically from 1 to 9, preferably at a pH value of or below 9 (e.g. from 5 to 9), of or below 8 (e.g. from 5 to 8), of or below 7 (e.g. from 5 to 7), most preferably at a physiological pH, e.g. from 7.3 to 7.4.

[0537] Accordingly, a “(poly-)cationic compound” may be any positively charged compound or polymer, preferably a cationic peptide or protein, which is positively charged under physiological conditions, particularly under physiological conditions in vivo. A “(poly-)cationic peptide or protein” may contain at least one positively charged amino acid, or more than one positively charged amino acid, e.g. selected from Arg, His, Lys or Orn.

### (Poly-)Cationic Amino Acids, Peptides and Proteins

[0538] (Poly-)cationic compounds being particularly preferred agents for complexation or association of artificial nucleic acid (RNA) molecules of the invention include protamine, nucleoline, spermine or spermidine, or other cationic peptides or proteins, such as poly-L-lysine (PLL), poly-arginine, basic polypeptides, cell penetrating peptides (CPPs), including HIV-binding peptides, HIV-1 Tat (HIV), Tat-derived peptides, Penetratin, VP22 derived or analog peptides, HSV VP22 (Herpes simplex), MAP, KALA or protein transduction domains (PTDs), PpT620, prolin-rich peptides, arginine-rich peptides, lysine-rich peptides, MPG-peptide(s), Pep-1, L-oligomers, Calcitonin peptide(s), Antennapedia-derived peptides (particularly from Drosophila antennapedia), pAntp, pIsl, FGF, Lactoferrin, Transportan, Buforin-2, Bac715-24, SynB, SynB(1), pVEC, hCT-derived peptides, SAP, or histones.

[0539] Preferably, the artificial nucleic acid (RNA) molecule of the invention may be complexed with one or more (poly-)cations, preferably with protamine or oligofectamine (discussed below), most preferably with protamine.

[0540] Further preferred (poly-)cationic proteins or peptides may be selected from the following proteins or peptides according to the following formula (III):

(Arg)ₗ;(Lys)ₘ;(His)ₙ;(Orn)ₒ;(Xaa)ₓ, (formula (III))

wherein l+m+n+o+x=8-15, and l, m, n or o independently of each other may be any number selected from 0, 1, 2, 3, 4, 5, 6, 7, 8, 9, 10, 11, 12, 13, 14 or 15, provided that the overall content of Arg, Lys, His and Orn represents at least 50% of all amino acids of the oligopeptide; and Xaa may be any amino acid selected from native (=naturally occurring) or non-native amino acids except of Arg, Lys, His or Orn; and x may be any number selected from 0, 1, 2, 3 or 4, provided, that the overall content of Xₐₐ does not exceed 50% of all amino acids of the oligopeptide. Particularly preferred cationic peptides in this context are e.g. Arg₇, Arg₈, Arg₉, H₃R₉, R₉H₃, H₃R₉H₃, YSSR₉SSY, (RKH)₄, Y(RKH)₂R, etc. In this context, the disclosure of WO 2009/030481 is incorporated herewith by reference.

### (Poly-)Cationic Polysaccharides

[0541] Further preferred (poly-)cationic compounds for complexation of or association with artificial nucleic acid (RNA) molecules of the invention include (poly-)cationic polysaccharides, e.g. chitosan, polybrene, cationic polymers, e.g. polyethyleneimine (PEI).

### (Poly-)Cationic Lipids

[0542] Further preferred (poly-)cationic compounds for complexation of or association with artificial nucleic acid (RNA) molecules of the invention include (poly-)cationic lipids, e.g. DOTMA: [1-(2,3-sioleyloxy)propyl)]-N,N,N-trimethylammonium chloride, DMRIE, di-C14-amidine, DOTIM, SAINT, DC-Chol, BGTC, CTAP, DOPC, DODAP, DOPE: Dioleyl phosphatidylethanol-amine, DOSPA, DODAB, DOIC, DMEPC, DOGS: Dioctadecylamidoglicylspermin, DIMRI: Dimyristo-oxypropyl dimethyl hydroxyethyl ammonium bromide, DOTAP: dioleoyloxy-3-(trimethylammonio)propane, DC-6-14: O,O-ditetradecanoyl-N-(alpha-trimethylammonioacetyl)diethanolamine chloride, CLIP1: rac-[(2,3-dioctadecyloxypropyl)(2-hydroxyethyl)]-dimethylammonium chloride, CLIP6: rac-[2(2,3-dihexadecyloxypropyl-oxymethyloxy)ethyl]trimethylammonium, CLIP9: rac-[2(2,3-dihexadecyloxypropyl-oxysuccinyloxy)ethyl]-trimethylammonium, or oligofectamine.

### (Poly-)Cationic Polymers

[0543] Further preferred (poly-)cationic compounds for complexation of or association with artificial nucleic acid (RNA) molecules of the invention include (poly-)cationic polymers, e.g. modified polyaminoacids, such as beta-aminoacid-polymers or reversed polyamides, etc., modified polyethylenes, such as PVP (poly(N-ethyl-4-vinylpyridinium bromide)), etc., modified acrylates, such as pDMAEMA (poly(dimethylaminoethyl methylacrylate)), etc., modified amidoamines such as pAMAM (poly(amidoamine)), etc., modified polybetaaminoester (PBAE), such as diamine end modified 1,4 butanediol diacrylate-co-5-amino-1-pentanol polymers, etc., dendrimers, such as polypropylamine dendrimers or pAMAM based dendrimers, etc., polyimine(s), such as PEI: poly(ethyleneimine), poly(propyleneimine), etc., polyallylamine, sugar backbone based polymers, such as cyclodextrin based polymers, dextran based polymers, chitosan, etc., silan backbone based polymers, such as PMOXA-PDMS copolymers, etc., or blockpolymers consisting of a combination of one or more cationic blocks (e.g. selected from a cationic polymer as mentioned above) and of one or more hydrophilic or hydrophobic blocks (e.g. polyethyleneglycole).

### Polymeric Carriers

[0544] According to preferred embodiments, artificial nucleic acid (RNA) molecules of the invention may be complexed or associated with a polymeric carrier.

[0545] A “polymeric carrier” used according to the invention may be a polymeric carrier formed by disulfide-crosslinked cationic components. The disulfide-crosslinked cationic components may be the same or different from each other. The polymeric carrier may also contain further components.

[0546] It may be particularly preferred that the polymeric carrier used according to the present invention comprises mixtures of cationic peptides, proteins or polymers and optionally further components as defined herein, which are crosslinked by disulfide bonds as described herein. In this context, the disclosure of WO 2012/013326 is incorporated herewith by reference.

[0547] In this context, the cationic components, which form basis for the polymeric carrier by disulfide-crosslinkage, are typically selected from any suitable (poly-)cationic peptide, protein or polymer suitable for this purpose, particular any (poly-)cationic peptide, protein or polymer capable of complexing, and thereby preferably condensing, the artificial nucleic acid (RNA) molecule of the invention. The (poly-)cationic peptide, protein or polymer, may preferably be a linear molecule, however, branched (poly-)cationic peptides, proteins or polymers may also be used.

[0548] Every disulfide-crosslinking (poly-)cationic protein, peptide or polymer of the polymeric carrier, which may be used to complex the artificial nucleic acid (RNA) molecules typically contains at least one —SH moiety, most preferably at least one cysteine residue or any further chemical group exhibiting an —SH moiety, capable of forming a disulfide linkage upon condensation with at least one further (poly-)cationic protein, peptide or polymer as cationic component of the polymeric carrier as mentioned herein.

[0549] As defined above, the polymeric carrier, which may be used to complex the artificial nucleic acid (RNA) molecule of the invention may be formed by disulfide-crosslinked cationic (or polycationic) components. Preferably, such (poly-)cationic peptides or proteins or polymers of the polymeric carrier, which comprise or are additionally modified to comprise at least one —SH moiety, are selected from, proteins, peptides and polymers as defined herein.

[0550] In some embodiments, the polymeric carrier may be selected from a polymeric carrier molecule according to formula (IV):

L-P¹—S—[S—P²—S]—S—P³-L formula (IV)

wherein,
P¹ and P³ are different or identical to each other and represent a linear or branched hydrophilic polymer chain, each P¹ and P³ exhibiting at least one —SH-moiety, capable to form a disulfide linkage upon condensation with component P², or alternatively with (AA), (AA)ₓ, or [(AA)ₓ]_{z} if such components are used as a linker between P¹ and P² or P³ and P²) and/or with further components (e.g. (AA), (AA)ₓ, [(AA)ₓ]_{z} or L), the linear or branched hydrophilic polymer chain selected independent from each other from polyethylene glycol (PEG), poly-N-(2-hydroxypropyl)methacrylamide, poly-2-(methacryloyloxy)ethyl phosphorylcholines, poly(hydroxyalkyl L-asparagine), poly(2-(methacryloyloxy)ethyl phosphorylcholine), hydroxyethylstarch or poly(hydroxyalkyl L-glutamine), wherein the hydrophilic polymer chain exhibits a molecular weight of about 1 kDa to about 100 kDa, preferably of about 2 kDa to about 25 kDa; or more preferably of about 2 kDa to about 10 kDa, e.g. about 5 kDa to about 25 kDa or 5 kDa to about 10 kDa;
P² is a (poly-)cationic peptide or protein, e.g. as defined above for the polymeric carrier formed by disulfide-crosslinked cationic components, and preferably having a length of about 3 to about 100 amino acids, more preferably having a length of about 3 to about 50 amino acids, even more preferably having a length of about 3 to about 25 amino acids, e.g. a length of about 3 to 10, 5 to 15, 10 to 20 or 15 to 25 amino acids, more preferably a length of about 5 to about 20 and even more preferably a length of about 10 to about 20; or is a (poly-)cationic polymer, e.g. as defined above for the polymeric carrier formed by disulfide-crosslinked cationic
components, typically having a molecular weight of about 0.5 kDa to about 30 kDa, including a molecular weight of about 1 kDa to about 20 kDa, even more preferably of about 1.5 kDa to about 10 kDa, or having a molecular weight of about 0.5 kDa to about 100 kDa, including a molecular weight of about 10 kDa to about 50 kDa, even more preferably of about 10 kDa to about 30 kDa;
each P² exhibiting at least two —SH-moieties, capable to form a disulfide linkage upon condensation with further components P² or component(s) P¹ and/or P³ or alternatively with further components (e.g. (AA), (AA)ₓ, or [(AA)ₓ]_{z}); —S—S— is a (reversible) disulfide bond (the brackets are omitted for better readability), wherein S preferably represents sulphur or a —SH carrying moiety, which has formed a (reversible) disulfide bond. The (reversible) disulfide bond is preferably formed by condensation of —SH-moieties of either components P¹ and P², P² and P², or P² and P³, or optionally of further components as defined herein (e.g. L, (AA), (AA)ₓ, [(AA)ₓ]_{z}, etc); The —SH-moiety may be part of the structure of these components or added by a modification as defined below;
L is an optional ligand, which may be present or not, and may be selected independent from the other from RGD, Transferrin, Folate, a signal peptide or signal sequence, a localization signal or sequence, a nuclear localization signal or sequence (NLS), an antibody, a cell penetrating peptide, (e.g. TAT or KALA), a ligand of a receptor (e.g. cytokines, hormones, growth factors etc), small molecules (e.g. carbohydrates like mannose or galactose or synthetic ligands), small molecule agonists, inhibitors or antagonists of receptors (e.g. RGD peptidomimetic analogues), or any further protein as defined herein, etc.;
n is an integer, typically selected from a range of about 1 to 50, preferably from a range of about 1, 2 or 3 to 30, more preferably from a range of about 1, 2, 3, 4, or 5 to 25, or a range of about 1, 2, 3, 4, or 5 to 20, or a range of about 1, 2, 3, 4, or 5 to 15, or a range of about 1, 2, 3, 4, or 5 to 10, including e.g. a range of about 4 to 9, 4 to 10, 3 to 20, 4 to 20, 5 to 20, or 10 to 20, or a range of about 3 to 15, 4 to 15, 5 to 15, or 10 to 15, or a range of about 6 to 11 or 7 to 10. Most preferably, n is in a range of about 1, 2, 3, 4, or 5 to 10, more preferably in a range of about 1, 2, 3, or 4 to 9, in a range of about 1, 2, 3, or 4 to 8, or in a range of about 1, 2, or 3 to 7.

[0551] In this context, the disclosure of WO 2011/026641 is incorporated herewith by reference. Each of hydrophilic polymers P¹ and P³ typically exhibits at least one —SH-moiety, wherein the at least one —SH-moiety is capable to form a disulfide linkage upon reaction with component P² or with component (AA) or (AA)ₓ, if used as linker between P¹ and P² or P³ and P² as defined below and optionally with a further component, e.g. L and/or (AA) or (AA)ₓ, e.g. if two or more —SH-moieties are contained. The following subformulae “P¹—S—S—P²” and “P²—S—S—P³” within generic formula (IV) above (the brackets are omitted for better readability), wherein any of S, P¹ and P³ are as defined herein, typically represent a situation, wherein one-SH-moiety of hydrophilic polymers P¹ and P³ was condensed with one —SH-moiety of component P² of generic formula (IV) above, wherein both sulphurs of these —SH-moieties form a disulfide bond —S—S— as defined herein in formula (IV). These —SH-moieties are typically provided by each of the hydrophilic polymers P¹ and P³, e.g. via an internal cysteine or any further (modified) amino acid or compound which carries a —SH moiety. Accordingly, the subformulae “P¹—S—S—P²” and “P²—S—S—P³” may also be written as “P¹-Cys-Cys-P²” and “P²-Cys-Cys-P³”, if the —SH— moiety is provided by a cysteine, wherein the term Cys-Cys represents two cysteines coupled via a disulfide bond, not via a peptide bond. In this case, the term “—S—S—” in these formulae may also be written as “—S-Cys”, as “-Cys-S” or as “-Cys-Cys-”. In this context, the term “-Cys-Cys-” does not represent a peptide bond but a linkage of two cysteines via their —SH-moieties to form a disulfide bond. Accordingly, the term “-Cys-Cys-” also may be understood generally as “-(Cys-S)—(S-Cys)-”, wherein in this specific case S indicates the sulphur of the —SH-moiety of cysteine. Likewise, the terms “—S-Cys” and “—Cys-S” indicate a disulfide bond between a —SH containing moiety and a cysteine, which may also be written as “—S—(S-Cys)” and “-(Cys-S)—S”. Alternatively, the hydrophilic polymers P¹ and P³ may be modified with a —SH moiety, preferably via a chemical reaction with a compound carrying a —SH moiety, such that each of the hydrophilic polymers P¹ and P³ carries at least one such —SH moiety. Such a compound carrying a —SH moiety may be e.g. an (additional) cysteine or any further (modified) amino acid, which carries a —SH moiety. Such a compound may also be any non-amino compound or moiety, which contains or allows to introduce a —SH moiety into hydrophilic polymers P¹ and P³ as defined herein. Such non-amino compounds may be attached to the hydrophilic polymers P¹ and P³ of formula (IV) of the polymeric carrier according to the present invention via chemical reactions or binding of compounds, e.g. by binding of a 3-thio propionic acid or thioimolane, by amide formation (e.g. carboxylic acids, sulphonic acids, amines, etc), by Michael addition (e.g maleinimide moieties, α,β-unsaturated carbonyls, etc), by click chemistry (e.g. azides or alkines), by alkene/alkine methatesis (e.g. alkenes or alkines), imine or hydrozone formation (aldehydes or ketons, hydrazins, hydroxylamins, amines), complexation reactions (avidin, biotin, protein G) or components which allow Sₙ-type substitution reactions (e.g halogenalkans, thiols, alcohols, amines, hydrazines, hydrazides, sulphonic acid esters, oxyphosphonium salts) or other chemical moieties which can be utilized in the attachment of further components. A particularly preferred PEG derivate in this context is alpha-Methoxy-omega-mercapto poly(ethylene glycol). In each case, the SH-moiety, e.g. of a cysteine or of any further (modified) amino acid or compound, may be present at the terminal ends or internally at any position of hydrophilic polymers P¹ and P³. As defined herein, each of hydrophilic polymers P¹ and P³ typically exhibits at least one —SH-moiety preferably at one terminal end, but may also contain two or even more —SH-moieties, which may be used to additionally attach further components as defined herein, preferably further functional peptides or proteins e.g. a ligand, an amino acid component (AA) or (AA)ₓ, antibodies, cell penetrating peptides or enhancer peptides (e.g. TAT, KALA), etc.

### Weight Ratio and N/P Ratio

[0552] In some embodiments of the invention, the artificial nucleic acid (RNA) molecule is associated with or complexed with a (poly-)cationic compound or a polymeric carrier, optionally in a weight ratio selected from a range of about 6:1 (w/w) to about 0.25:1 (w/w), more preferably from about 5:1 (w/w) to about 0.5:1 (w/w), even more preferably of about 4:1 (w/w) to about 1:1 (w/w) or of about 3:1 (w/w) to about 1:1 (w/w), and most preferably a ratio of about 3:1 (w/w) to about 2:1 (w/w) of nucleic acid to (poly-)cationic compound and/or polymeric carrier; or optionally in a nitrogen/phosphate (N/P) ratio of nucleic acid (RNA) to (poly-)cationic compound and/or polymeric carrier in the range of about 0.1-10, preferably in a range of about 0.3-4 or 0.3-1, and most preferably in a range of about 0.5-1 or 0.7-1, and even most preferably in a range of about 0.3-0.9 or 0.5-0.9. More preferably, the N/P ratio of the at least one artificial nucleic acid (RNA) molecule to the one or more polycations is in the range of about 0.1 to 10, including a range of about 0.3 to 4, of about 0.5 to 2, of about 0.7 to 2 and of about 0.7 to 1.5.

[0553] The artificial nucleic acid (RNA) molecule of the invention may also be associated with a vehicle, transfection or complexation agent for increasing the transfection efficiency of said artificial nucleic acid (RNA) molecule.

[0554] In this context, the artificial nucleic acid (RNA) molecule may preferably be complexed at least partially with a (poly-)cationic compound and/or a polymeric carrier, preferably cationic proteins or peptides. In this context, the disclosure of WO 2010/037539 and WO 2012/113513 is incorporated herewith by reference. “Partially” means that only a part of said artificial nucleic acid (RNA) molecule is complexed with a (poly-)cationic compound and/or polymeric carrier, while the rest of said artificial nucleic acid (RNA) molecule is present in uncomplexed (“free) form.

[0555] Preferably, the molar ratio of the complexed artificial nucleic acid (RNA) molecule, to the free artificial nucleic acid (RNA) molecule may be selected from a molar ratio of about 0.001:1 to about 1:0.001, including a ratio of about 1:1. More preferably the ratio of complexed artificial nucleic acid (RNA) molecule to free artificial nucleic acid (RNA) molecule may be selected from a range of about 5:1 (w/w) to about 1:10 (w/w), more preferably from a range of about 4:1 (w/w) to about 1:8 (w/w), even more preferably from a range of about 3:1 (w/w) to about 1:5 (w/w) or 1:3 (w/w), and most preferably from a ratio of about 1:1 (w/w).

[0556] The complexed artificial nucleic acid (RNA) molecule of the invention is preferably prepared according to a first step by complexing the artificial nucleic acid (RNA) molecule with a (poly-)cationic compound and/or with a polymeric carrier, preferably as defined herein, in a specific ratio to form a stable complex. In this context, it is highly preferable, that no free (poly-)cationic compound or polymeric carrier or only a negligibly small amount thereof remains in the fraction of the complexed artificial nucleic acid (RNA) molecule after complexing said artificial nucleic acid (RNA) molecule. Accordingly, the ratio of the artificial nucleic acid (RNA) molecule and the (poly-)cationic compound and/or the polymeric carrier in the fraction of the complexed artificial nucleic acid (RNA) molecule is typically selected in a range so that the artificial nucleic acid (RNA) molecule is entirely complexed and no free (poly-)cationic compound or polymeric carrier or only a negligibly small amount thereof remains in said fraction.

[0557] Preferably, the ratio of the artificial nucleic acid (RNA) molecule to the (poly-)cationic compound and/or the polymeric carrier, preferably as defined herein, is selected from a range of about 6:1 (w/w) to about 0,25:1 (w/w), more preferably from about 5:1 (w/w) to about 0,5:1 (w/w), even more preferably of about 4:1 (w/w) to about 1:1 (w/w) or of about 3:1 (w/w) to about 1:1 (w/w), and most preferably a ratio of about 3:1 (w/w) to about 2:1 (w/w).

[0558] Alternatively, the ratio of the artificial nucleic acid (RNA) molecule to the (poly-)cationic compound and/or the polymeric carrier may also be calculated on the basis of the nitrogen/phosphate ratio (N/P-ratio) of the entire complex. In the context of the present invention, an N/P-ratio is preferably in the range of about 0.1-10, preferably in a range of about 0.3-4 and most preferably in a range of about 0.5-2 or 0.7-2 regarding the ratio of artificial nucleic acid (RNA) molecule to (poly-)cationic compound and/or polymeric carrier, preferably as defined herein, in the complex, and most preferably in a range of about 0.7-1,5, 0.5-1 or 0.7-1, and even most preferably in a range of about 0.3-0.9 or 0.5-0.9, preferably provided that the (poly-)cationic compound in the complex is a (poly-)cationic protein or peptide and/or the polymeric carrier as defined above.

[0559] In other embodiments, artificial nucleic acid (RNA) molecule is provided and used in free or naked form without being associated with any further vehicle, transfection or complexation agent.

### Targeted Delivery

[0560] In some embodiments, artificial nucleic acid (RNA) molecules of the invention (or (pharmaceutical) compositions or kits comprising the same) are adapted for targeted delivery to organs, tissues or cells or interest. “Targeted delivery” typically involves the use of targeting elements which specifically enhance translocation of the artificial nucleic acid (RNA) molecule to specific tissues or cells.

[0561] Such (proteinaceous) targeting elements may either be encoded by the artificial nucleic acid (RNA) molecule, preferably in frame with the coding sequence encoding the desired therapeutic, antigenic, allergenic or reporter protein such that said protein is expressed as a fusion protein comprising said proteinaceous targeting element. Alternatively, said (proteinaceous or non-proteinaceous) targeting element may be present in, form part of or be associated with (poly-)cationic compounds or carriers complexing said artificial nucleic acid (RNA) molecules, and/or may be resent in, form part of or be associated with lipids enclosing or complexing said artificial nucleic acid (RNA) molecules as liposomes, lipid nanoparticles, lipoplexes, and the like.

[0562] A “target” is a specific organ, tissue, or cell for which uptake of the artificial nucleic acid (RNA) molecule and preferably expression of the encoded (poly-)peptide or protein of interest is intended. “Uptake” means the translocation of the artificial nucleic acid (RNA) molecule from the extracellular to intracellular compartments. This can involve receptor mediated processes, fusion with cell membranes, endocytosis, potocytosis, pinocytosis or other translocation mechanisms. The artificial nucleic acid (RNA) molecule may be taken up by itself or as part of a complex.

[0563] As a non-limiting example, (poly-)cationic compounds, carriers, liposomes or lipid nanoparticles associated with or complexing the inventive artificial nuclei acid (RNA) molecules may be endowed with targeting elements or -functionalities. Additionally or alternatively, the artificial nucleic acid (RNA) molecule may encode (poly-)peptides or proteins carrying, preferably via covalent linkages, targeting elements. Targeting elements may be selected from proteins (e.g., glycoproteins, or peptides, e.g., molecules having a specific affinity for a co-ligand, or antibodies e.g., an antibody, that binds to a specified cell type such as a epithelial cell, keratinocyte or the like), hormones and hormone receptors, non-peptidic species, such as lipids, lectins, carbohydrates, vitamins, cofactors, multivalent lactose, multivalent galactose, N-acetyl-galactosamine, N-acetyl-gulucosamine multivalent mannose, multivalent fucose, or aptamers, and any ligand capable of targeting an artificial nucleic acid (RNA) molecule to a site of interest, such as an organ, tissue or cell.

[0564] In some embodiments, the artificial nucleic acid (RNA) molecules, or (pharmaceutical) compositions or kits comprising the same, are adapted for targeting (in)to the liver. Such artificial nucleic acid (RNA) molecules or (pharmaceutical) compositions or kits may be particularly suited for treatment, prevention, post-exposure prophylaxis or attenuation of a disease selected from the group consisting of genetic diseases, allergies, autoimmune diseases, infectious diseases, neoplasms, cancer and tumor-related diseases, inflammatory diseases, diseases of the blood and blood-forming organs, endocrine, nutritional and metabolic diseases, diseases of the nervous system, inherited diseases, diseases of the circulatory system, diseases of the respiratory system, diseases of the digestive system, diseases of the skin and subcutaneous tissue, diseases of the musculoskeletal system and connective tissue, and diseases of the genitourinary system independently if they are inherited or acquired and combinations thereof. In some embodiments, artificial nucleic acid (RNA) molecules adapted for liver-targeting comprise UTR elements according to a-2 (NDUFA4/PSMB3); a-5 (MP68/PSMB3); c-1 (NDUFA4/RPS9); a-1 (HSD17B4/PSMB3); e-3 (MP68/RPS9); e-4 (NOSIP/RPS9); a-4 (NOSIP/PSMB3); e-2 (RPL31/RPS9); e-5 (ATP5A1/RPS9); d-4 (HSD17B4/NUDFA1); b-5 (NOSIP/COX6B1); a-3 (SLC7A3/PSMB3); b-1 (UBQLN2/RPS9); b-2 (ASAH1/RPS9); b-4 (HSD17B4/CASP1); e-6 (ATP5A1/COX6B1); b-3 (HSD17B4/RPS9); g-5 (RPL31/CASP1); h-1 (RPL31/COX6B1); and/or c-5 (ATP5A1/PSMB3) as defined above. Such artificial nucleic acid (RNA) molecules or particles comprising such RNA molecules may for instance comprise targeting elements or modifications selected from the group consisting of galactose or lactose (targeting the asialoglycoprotein-receptor); apolipoprotein E; mannose; fucose; hyaluran; mannose-6-phosphate; lactose; mannose; Vitamin-A; galactosamine, GalNac and antibodies or fragments targeting synaptophysin as described by Poelstra et al. (J Control Release 161:188-197, 2012) or Mishra et al. (Biomed Res Int. 2013:382184, 2013).

[0565] In some embodiments, the artificial nucleic acid (RNA) molecules, or (pharmaceutical) compositions or kits comprising the same, are adapted for targeting to the skin. In some embodiments, such artificial nucleic acid (RNA) molecules comprise UTR elements according to a-2 (NDUFA4/PSMB3); a-5 (MP68/PSMB3); c-1 (NDUFA4/RPS9); a-1 (HSD17B4/PSMB3); e-3 (MP68/RPS9); e-4 (NOSIP/RPS9); a-4 (NOSIP/PSMB3); e-2 (RPL31/RPS9); e-5 (ATP5A1/RPS9); d-4 (HSD17B4/NUDFA1); b-5 (NOSIP/COX6B1); a-3 (SLC7A3/PSMB3); b-1 (UBQLN2/RPS9); b-2 (ASAH1/RPS9); b-4 (HSD17B4/CASP1); e-6 (ATP5A1/COX6B1); b-3 (HSD17B4/RPS9); g-5 (RPL31/CASP1); h-1 (RPL31/COX6B1); and/or c-5 (ATP5A1/PSMB3) as defined above. Such artificial nucleic acid (RNA) molecules or particles comprising such RNA molecules may for instance comprise targeting elements as described herein below.

[0566] In some embodiments, the artificial nucleic acid (RNA) molecules, or (pharmaceutical) compositions or kits comprising the same, are adapted for targeting to the muscle. In some embodiments, such artificial nucleic acid (RNA) molecules comprise UTR elements according to a-2 (NDUFA4/PSMB3); a-5 (MP68/PSMB3); c-1 (NDUFA4/RPS9); a-1 (HSD17B4/PSMB3); e-3 (MP68/RPS9); e-4 (NOSIP/RPS9); a-4 (NOSIP/PSMB3); e-2 (RPL31/RPS9); e-5 (ATP5A1/RPS9); d-4 (HSD17B4/NUDFA1); b-5 (NOSIP/COX6B1); a-3 (SLC7A3/PSMB3); b-1 (UBQLN2/RPS9); b-2 (ASAH1/RPS9); b-4 (HSD17B4/CASP1); e-6 (ATP5A1/COX6B1); b-3 (HSD17B4/RPS9); g-5 (RPL31/CASP1); h-1 (RPL31/COX6B1); and/or c-5 (ATP5A1/PSMB3) as defined above. Such artificial nucleic acid (RNA) molecules or particles comprising such RNA molecules may for instance comprise targeting elements as described herein below.

[0567] Suitable targeting elements for use in connection with the present invention include: lectins, glycoproteins, lipids and proteins, e.g., antibodies. In particular, targeting elements may be selected from a thyrotropin, melanotropin, lectin, glycoprotein, surfactant protein A, Mucin carbohydrate, multivalent lactose, multivalent galactose, N-acetyl-galactosamine, N-acetyl-gulucosamine multivalent mannose, multivalent fucose, glycosylated polyaminoacids, multivalent galactose, transferrin, bisphosphonate, polyglutamate, polyaspartate, a lipid, cholesterol, a steroid, bile acid, folate, vitamin B12, biotin, an RGD peptide, an RGD peptide mimetic or an aptamer.

[0568] Further targeting elements may be selected from proteins, e.g., glycoproteins, or peptides, e.g., molecules having a specific affinity for a co-ligand, or antibodies e.g., capable of binding to a specified cell type such as a liver, tumor, muscle, skin or kidney cell. Further targeting elements may be selected from hormones and hormone receptors. Further targeting elements may be selected from lipids, lectins, carbohydrates, vitamins, cofactors, multivalent lactose, multivalent galactose, N-acetyl-galactosamine, N-acetyl-gulucosamine multivalent mannose, multivalent fucose, or aptamers. Targeting elements may bind to any suitable ligand selected from, e.g. a lipopolysaccharide, or an activator of p38 MAP kinase.

[0569] Further targeting elements may be selected from ligands capable of targeting a specific receptor. Examples include, without limitation, folate, GalNAc, galactose, mannose, mannose-6P, apatamers, integrin receptor ligands, chemokine receptor ligands, transferrin, biotin, serotonin receptor ligands, PSMA, endothelin, GCPII, somatostatin, (KKEEE)3K, LDL, and HDL ligands. Further targeting elements may be selected from aptamers. The aptamer may be unmodified or may have any combination of modifications disclosed herein.

### (Pharmaceutical) Composition and Vaccines

[0570] In a further aspect, the present invention provides a composition comprising the artificial nucleic acid (RNA) molecule of the invention, and preferably at least one pharmaceutically acceptable carrier and/or excipient. According to preferred embodiments, the composition is provided as a pharmaceutical composition. According to further preferred embodiments, the (pharmaceutical) composition may be provided as a vaccine. A “vaccine” is typically understood to be a prophylactic or therapeutic material providing at least one antigen, preferably an antigenic peptide or protein. “Providing at least on antigen” means, for example, that the vaccine comprises the antigen or that the vaccine comprises a molecule that, e.g., codes for the antigen. Accordingly, it is particularly envisaged herein that the inventive vaccine comprises at least one artificial nucleic acid (RNA) molecule encoding at least one antigenic (poly-)peptide or protein as defined herein, which may, for instance, be derived from a tumor antigen, a bacterial, viral, fungal or protozoal antigen, an autoantigen, an allergen, or an allogenic antigen, and preferably induces an immune response towards the respective antigen when it is expressed and presented to the immune system. However, artificial nucleic acid (RNA) molecules encoding non-antigenic (poly-)peptides or proteins of interest may also be used in the inventive vaccine.

[0571] The (pharmaceutical) composition or vaccine of the invention preferably comprises at least one, preferably a plurality of at least two artificial nucleic acid (RNA) molecules as described herein. Said plurality of at least two artificial nucleic acid (RNA) molecules may be monocistronic, bicistronic or multicistronic as described herein. Each of the artificial nucleic acid (RNA) molecules in the (pharmaceutical) composition or vaccine may encode at least one, or a plurality of at least two (identical or different) (poly-)peptides or proteins of interest. The artificial nucleic acid (RNA) molecules may be provided in the (pharmaceutical) composition or vaccine in “complexed” or “free” form as described above, or a mixture thereof. The (pharmaceutical) composition or vaccine may further comprise at least one additional active agent useful for treatment of the disease or condition that is subject to therapy with the artificial nucleic acid (RNA) molecule, or (pharmaceutical) composition or vaccine comprising the same.

### Pharmaceutically Acceptable Excipients and Carriers

[0572] Preferably, the (pharmaceutical) composition or vaccine according to the invention comprises at least one pharmaceutically acceptable carrier and/or excipient. The term “pharmaceutically acceptable” refers to a compound or agent that is compatible with the one or more active agent(s) (here: artificial nucleic acid (RNA) molecule and optionally additional active agent) and does not interfere with and/or substantially reduce its/their pharmaceutical effect. Pharmaceutically acceptable carriers and excipients preferably have sufficiently high purity and sufficiently low toxicity to make them suitable for administration to a subject to be treated.

### Excipients

[0573] Pharmaceutically acceptable excipients can exhibit different functional roles and include, without limitation, diluents, fillers, bulking agents, carriers, disintegrants, binders, lubricants, glidants, coatings, solvents and co-solvents, buffering agents, preservatives, adjuvants, anti-oxidants, wetting agents, anti-foaming agents, thickening agents, sweetening agents, flavouring agents and humectants.

[0574] For (pharmaceutical) compositions in liquid form, useful pharmaceutically acceptable carriers and excipients include solvents, diluents, or carriers such as (pyrogen-free) water, (isotonic) saline solutions such phosphate or citrate buffered saline, fixed oils, vegetable oils, such as, for example, groundnut oil, cottonseed oil, sesame oil, olive oil, corn oil, ethanol, polyols (for example, glycerol, propylene glycol, polyetheylene glycol, and the like); lecithin; surfactants; preservatives such as benzyl alcohol, parabens, chlorobutanol, phenol, ascorbic acid, thimerosal, and the like; isotonic agents such as sugars, polyalcohols such as manitol, sorbitol, or sodium chloride; aluminium monostearate or gelatine; antioxidants such as ascorbic acid or sodium bisulphite; chelating agents such as ethylenediaminetetraacetic acid (EDTA); buffers such as acetates, citrates or phosphates and agents for the adjustment of tonicity such as sodium chloride or dextrose. pH can be adjusted with acids or bases, such as hydrochloric acid or sodium hydroxide. Buffers may be hypertonic, isotonic or hypotonic with reference to the specific reference medium, i.e. the buffer may have a higher, identical or lower salt content with reference to the specific reference medium, wherein preferably such concentrations of the aforementioned salts may be used, which do not lead to damage of cells due to osmosis or other concentration effects. Reference media are e.g. liquids occurring in “in vivo” methods, such as blood, lymph, cytosolic liquids, or other body liquids, or e.g. liquids, which may be used as reference media in “in vitro” methods, such as common buffers or liquids. Such common buffers or liquids are known to a skilled person.

[0575] Ringer solution or Ringer-Lactate solution are particularly preferred as a liquid carrier.

[0576] For (pharmaceutical) compositions in (semi-)solid form, useful pharmaceutically acceptable carriers and excipients include binders such as microcrystalline cellulose, gum tragacanth or gelatine; starch or lactose; sugars, such as, for example, lactose, glucose and sucrose; starches, such as, for example, corn starch or potato starch; cellulose and its derivatives, such as, for example, sodium carboxymethylcellulose, ethylcellulose, cellulose acetate; disintegrants such as alginic acid; lubricants such as magnesium stearate; glidants such as stearic acid, magnesium stearate; calcium sulphate, colloidal silicon dioxide and the like; sweetening agents such as sucrose or saccharin; and/or flavouring agents such as peppermint, methyl salicylate, or orange flavouring.

### Formulations

[0577] Suitable pharmaceutically acceptable carriers and excipients may typically be chosen based on the desired formulation of the (pharmaceutical) composition.

[0578] Liquid (pharmaceutical) compositions administered via injection and in particular via i.v. injection should be sterile and stable under the conditions of manufacture and storage. Such compositions are typically formulated as parenterally acceptable aqueous solutions that are pyrogen-free, have suitable pH, are isotonic and maintain stability of the active ingredient(s). Particularly useful pharmaceutically acceptable carriers and excipients for liquid (pharmaceutical) compositions according to the invention include water, typically pyrogen-free water; isotonic saline or buffered (aqueous) solutions, e.g phosphate, citrate etc. buffered solutions. Particularly for injection of the inventive (pharmaceutical) compositions, water or preferably a buffer, more preferably an aqueous buffer, may be used, containing a sodium salt, preferably at least 50 mM of a sodium salt, a calcium salt, preferably at least 0.01 mM of a calcium salt, and optionally a potassium salt, preferably at least 3 mM of a potassium salt.

[0579] According to preferred embodiments, the sodium, calcium and, optionally, potassium salts may occur in the form of their halogenides, e.g. chlorides, iodides, or bromides, in the form of their hydroxides, carbonates, hydrogen carbonates, or sulphates, etc. Without being limited thereto, examples of sodium salts include e.g. NaCl, NaI, NaBr, Na₂CO₃, NaHCO₃, Na₂SO₄, examples of the optional potassium salts include e.g. KCl, KI, KBr, K₂CO₃, KHCO₃, K₂SO₄, and examples of calcium salts include e.g. CaCl₂, CaI₂, CaBr₂, CaCO₃, CaSO₄, Ca(OH)₂. Furthermore, organic anions of the aforementioned cations may be contained in the buffer.

[0580] According to preferred embodiments, the buffer suitable for injection purposes as defined above, may contain salts selected from sodium chloride (NaCl), calcium chloride (CaCl₂) and optionally potassium chloride (KCl), wherein further anions may be present additional to the chlorides. CaCl₂ can also be replaced by another salt like KCl. Typically, the salts in the injection buffer are present in a concentration of at least 50 mM sodium chloride (NaCl), at least 3 mM potassium chloride (KCl) and at least 0.01 mM calcium chloride (CaCl₂). The injection buffer may be hypertonic, isotonic or hypotonic with reference to the specific reference medium, i.e. the buffer may have a higher, identical or lower salt content with reference to the specific reference medium, wherein preferably such concentrations of the afore mentioned salts may be used, which do not lead to damage of cells due to osmosis or other concentration effects. Reference media are e.g. in “in vivo” methods occurring liquids such as blood, lymph, cytosolic liquids, or other body liquids, or e.g. liquids, which may be used as reference media in “in vitro” methods, such as common buffers or liquids.

[0581] Such common buffers or liquids are known to a skilled person. Ringer-Lactate solution is particularly preferred as a liquid basis.

[0582] (Pharmaceutical) compositions for topical administration can be formulated as creams, ointments, gels, pastes or powders, using suitable liquid and/or (semi-)solid excipients or carriers as described elsewhere herein. (Pharmaceutical) compositions for oral administration can be formulated as tablets, capsules, liquids, powders or in a sustained release format, using suitable liquid and/or (semi-)solid excipients or carriers as described elsewhere herein.

[0583] According to some preferred embodiments, the inventive (pharmaceutical) composition or vaccine is administered parenterally, in particular via intradermal or intramuscular injection, orally, nasally, pulmonary, by inhalation, topically, rectally, buccally, vaginally, or via an implanted reservoir, and is provided in liquid or lyophilized formulations for parenteral administration as discussed elsewhere herein. Parenteral formulations are typically stored in vials, IV bags, ampoules, cartridges, or prefilled syringes and can be administered as injections, inhalants, or aerosols, with injections being preferred.

[0584] According to preferred embodiments, (pharmaceutical) compositions or vaccine of the invention may comprise artificial nucleic acid (RNA) molecules of the invention complexed with lipids, preferably in the form of lipid nanoparticles, liposomes, lipoplexes or emulsions as described elsewhere herein.

[0585] According to further preferred embodiments, the (pharmaceutical) composition or vaccine is provided in lyophilized form. Preferably, the lyophilized (pharmaceutical) composition or vaccine is reconstituted in a suitable buffer, advantageously based on an aqueous carrier, prior to administration, e.g. Ringer-Lactate solution, which is preferred, Ringer solution, a phosphate buffer solution. In some embodiments, the (pharmaceutical) composition or vaccine of the invention contains at least two, three, four, five, six or more different artificial nucleic acid (RNA) molecules as defined herein, which may be provided separately in lyophilized form (optionally together with at least one further additive) and which may be reconstituted separately in a suitable buffer (such as Ringer-Lactate solution) prior to their use so as to allow individual administration of each of said artificial nucleic acid (RNA) molecules.

### Adjuvants

[0586] According to preferred embodiments, the (pharmaceutical) composition or vaccine of the invention may further comprise at least one adjuvant.

[0587] An “adjuvant” or “adjuvant component” in the broadest sense is typically a pharmacological and/or immunological agent that may modify, e.g. enhance, the effect of other active agents, e.g. therapeutic agents or vaccines. In this context, an “adjuvant” may be understood as any compound, which is suitable to support administration and delivery of inventive (pharmaceutical) composition. Specifically, an adjuvant may preferably enhance the immunostimulatory properties of the (pharmaceutical) composition or vaccine to which it is added. Furthermore, such adjuvants may, without being bound thereto, initiate or increase an immune response of the innate immune system, i.e. a non-specific immune response.

[0588] “Adjuvants” typically do not elicit an adaptive immune response. Insofar, “adjuvants” do not qualify as antigens. In other words, when administered, the inventive (pharmaceutical) composition or vaccine typically initiates an adaptive immune response due to an antigenic peptide or protein, which is encoded by the at least one coding sequence of the artificial nucleic acid (RNA) molecule contained in said (pharmaceutical) composition or vaccine. Additionally, an adjuvant present in the (pharmaceutical) composition or vaccine may generate an (supportive) innate immune response.

[0589] Suitable adjuvants may be selected from any adjuvant known to a skilled person and suitable for the present case, i.e. supporting the induction of an immune response in a mammal, and include, without limitation, TDM, MDP, muramyl dipeptide, pluronics, alum solution, aluminium hydroxide, ADJUMER™ (polyphosphazene); aluminium phosphate gel; glucans from algae; algammulin; aluminium hydroxide gel (alum); highly protein-adsorbing aluminium hydroxide gel; low viscosity aluminium hydroxide gel; AF or SPT (emulsion of squalane (5%), Tween 80 (0.2%), Pluronic L121 (1.25%), phosphate-buffered saline, pH 7.4); AVRIDINE™ (propanediamine); BAY R1005™ ((N-(2-deoxy-2-L-leucylamino-b-D-glucopyranosyl)-N-octadecyl-dodecanoyl-amide hydroacetate); CALCITRIOL™ (1-alpha,25-dihydroxy-vitamin D3); calcium phosphate gel; CAP™ (calcium phosphate nanoparticles); cholera holotoxin, cholera-toxin-A1-protein-A-D-fragment fusion protein, sub-unit B of the cholera toxin; CRL 1005 (block copolymer P1205); cytokine-containing liposomes; DDA (dimethyldioctadecylammonium bromide); DHEA (dehydroepiandrosterone); DMPC (dimyristoylphosphatidylcholine); DMPG (dimyristoylphosphatidylglycerol); DOC/alum complex (deoxycholic acid sodium salt); Freund”s complete adjuvant; Freund's incomplete adjuvant; gamma inulin; Gerbu adjuvant (mixture of: i) N-acetylglucosaminyl-(P1-4)-N-acetylmuramyl-L-alanyl-D-glutamine (GMDP), ii) dimethyldioctadecylammonium chloride (DDA), iii) zinc-L-proline salt complex (ZnPro-8); GM-CSF); GMDP (N-acetylglucosaminyl-(b1-4)-N-acetylmuramyl-L-alanyl-D-isoglutamine); imiquimod (1-(2-methypropyl)-1H-imidazo[4,5-c]quinoline-4-amine); ImmTher™ (N-acetylglucosaminyl-N-acetylmuramyl-L-Ala-D-isoGlu-L-Ala-glycerol dipalmitate); DRVs (immunoliposomes prepared from dehydration-rehydration vesicles); interferon-gamma; interleukin-1beta; interleukin-2; interleukin-7; interleukin-12; ISCOMS™; ISCOPREP 7.0.3™; liposomes; LOXORIBINE™ (7-allyl-8-oxoguanosine); LT oral adjuvant (E. coli labile enterotoxin-protoxin); microspheres and microparticles of any composition; MF59™; (squalene-water emulsion); MONTANIDE ISA 51™ (purified incomplete Freund's adjuvant); MONTANIDE ISA 720™ (metabolisable oil adjuvant); MPL™ (3-Q-desacyl-4″-monophosphoryl lipid A); MTP-PE and MTP-PE liposomes ((N-acetyl-L-alanyl-D-isoglutaminyl-L-alanine-2-(1,2-dipalmitoyl-sn-glycero-3-(hydroxyphosphoryloxy))-ethylamide, monosodium salt); MURAMETIDE™ (Nac-Mur-L-Ala-D-Gln-OCH3); MURAPALMITINE™ and D-MURAPALMITINE™ (Nac-Mur-L-Thr-D-isoGln-sn-glyceroldipalmitoyl); NAGO (neuraminidase-galactose oxidase); nanospheres or nanoparticles of any composition; NISVs (non-ionic surfactant vesicles); PLEURAN™ (β-glucan); PLGA, PGA and PLA (homo- and co-polymers of lactic acid and glycolic acid; microspheres/nanospheres); PLURONIC L121™; PMMA (polymethyl methacrylate); PODDS™ (proteinoid microspheres); polyethylene carbamate derivatives; poly-rA: poly-rU (polyadenylic acid-polyuridylic acid complex); polysorbate 80 (Tween 80); protein cochleates (Avanti Polar Lipids, Inc., Alabaster, Ala.); STIMULON™ (QS-21); Quil-A (Quil-A saponin); S-28463 (4-amino-otec-dimethyl-2-ethoxymethyl-1H-imidazo[4,5 c]quinoline-1-ethanol); SAF-1™ (“Syntex adjuvant formulation”); Sendai proteoliposomes and Sendai-containing lipid matrices; Span-85 (sorbitan trioleate); Specol (emulsion of Marcol 52, Span 85 and Tween 85); squalene or Robane® (2,6,10,15,19,23-hexamethyltetracosan and 2,6,10,15,19,23-hexamethyl-2,6,10,14,18,22-tetracosahexane); stearyltyrosine (octadecyltyrosine hydrochloride); Theramid® (N-acetylglucosaminyl-N-acetylmuramyl-L-Ala-D-isoGlu-L-Ala-dipalmitoxypropylamide); Theronyl-MDP (Termurtide™ or [thr 1]-MDP; N-acetylmuramyl-L-threonyl-D-isoglutamine); Ty particles (Ty-VLPs or virus-like particles); Walter-Reed liposomes (liposomes containing lipid A adsorbed on aluminium hydroxide), and lipopeptides, including Pam3Cys, in particular aluminium salts, such as Adju-phos, Alhydrogel, Rehydragel; emulsions, including CFA, SAF, IFA, MF59, Provax, TiterMax, Montanide, Vaxfectin; copolymers, including Optivax (CRL1005), L121, Poloaxmer4010), etc.; liposomes, including Stealth, cochleates, including BIORAL; plant derived adjuvants, including QS21, Quil A, Iscomatrix, ISCOM; adjuvants suitable for costimulation including Tomatine, biopolymers, including PLG, PMM, Inulin; microbe derived adjuvants, including Romurtide, DETOX, MPL, CWS, Mannose, CpG nucleic acid sequences, CpG7909, ligands of human TLR 1-10, ligands of murine TLR 1-13, ISS-1018, IC31, Imidazoquinolines, Ampligen, Ribi529, IMOxine, IRIVs, VLPs, cholera toxin, heat-labile toxin, Pam3Cys, Flagellin, GPI anchor, LNFPIII/Lewis X, antimicrobial peptides, UC-1V150, RSV fusion protein, cdiGMP; and adjuvants suitable as antagonists including CGRP neuropeptide.

[0590] Suitable adjuvants may also be selected from (poly-)cationic compounds as described herein as complexation agents (cf. section headed “(poly-)cationic compounds and carriers”), in particular the (poly-)cationic peptides or proteins, (poly-)cationic polysaccharides, (poly-)cationic lipids, or polymeric carriers described herein. Associating or complexing the artificial nucleic acid (RNA) molecule of the (pharmaceutical) composition or vaccine with these (poly-)cationic compounds or carriers may preferably provide adjuvant properties and confer a stabilizing effect.

[0591] The ratio of the artificial nucleic acid (RNA) molecule to the (poly-)cationic compound in the adjuvant component may be calculated on the basis of the nitrogen/phosphate ratio (N/P-ratio) of the entire complex, i.e. the ratio of positively charged (nitrogen) atoms of the (poly-)cationic compound to the negatively charged phosphate atoms of the artificial nucleic acid (RNA) molecule.

[0592] In the following, when referring to “RNA”, it will be understood that the respective disclosure is applicable to other artificial nucleic acid molecules as well, mutatis mutandis.

[0593] For example, 1 μg of RNA may contain about 3 nmol phosphate residues, provided said RNA exhibits a statistical distribution of bases. Additionally, 1 μg of peptide typically contains about x nmol nitrogen residues, dependent on the molecular weight and the number of basic amino acids. When exemplarily calculated for (Arg)9 (molecular weight 1424 g/mol, 9 nitrogen atoms), 1 μg (Arg)9 contains about 700 pmol (Arg)9 and thus 700×9=6300 pmol basic amino acids=6.3 nmol nitrogen atoms. For a mass ratio of about 1:1 RNA/(Arg)9 an N/P ratio of about 2 can be calculated. When exemplarily calculated for protamine (molecular weight about 4250 g/mol, 21 nitrogen atoms, when protamine from salmon is used) with a mass ratio of about 2:1 with 2 μg of RNA, 6 nmol phosphate are to be calculated for the RNA; 1 μg protamine contains about 235 pmol protamine molecules and thus 235×21=4935 pmol basic nitrogen atoms=4.9 nmol nitrogen atoms. For a mass ratio of about 2:1 RNA/protamine an N/P ratio of about 0.81 can be calculated. For a mass ratio of about 8:1 RNA/protamine an N/P ratio of about 0.2 can be calculated. In the context of the present invention, an N/P-ratio is preferably in the range of about 0.1-10, preferably in a range of about 0.3-4 and most preferably in a range of about 0.5-2 or 0.7-2 regarding the ratio of RNA:peptide in the complex, and most preferably in the range of about 0.7-1.5.

[0594] The (pharmaceutical) composition or vaccine of the present invention may be obtained in two separate steps in order to obtain both, an efficient immunostimulatory effect and efficient translation of the artificial nucleic acid (RNA) molecule comprised by said (pharmaceutical) composition or vaccine.

[0595] In a first step, an RNA is complexed with a (poly-)cationic compound in a specific ratio to form a stable complex (“complexed (RNA”). In this context, it is important, that no free (poly-)cationic compound or only a negligible small amount remains in the fraction of the complexed RNA. Accordingly, the ratio of the RNA and the (poly-)cationic compound is typically selected in a range that the RNA is entirely complexed and no free (poly-)cationic compound or only a neglectably small amount remains in the composition. Preferably the ratio of the RNA to the (poly-)cationic compound is selected from a range of about 6:1 (w/w) to about 0,25:1 (w/w), more preferably from about 5:1 (w/w) to about 0,5:1 (w/w), even more preferably of about 4:1 (w/w) to about 1:1 (w/w) or of about 3:1 (w/w) to about 1:1 (w/w), and most preferably a ratio of about 3:1 (w/w) to about 2:1 (w/w).

[0596] In a second step, an RNA is added to the complexed RNA in order to obtain the (pharmaceutical) composition or vaccine of the invention. Therein, said added RNA is present as free RNA, preferably as free mRNA, which is not complexed by other compounds. Prior to addition, the free RNA is not complexed and will preferably not undergo any detectable or significant complexation reaction upon the addition to the complexed RNA. This is due to the strong binding of the (poly-)cationic compound to the complexed RNA. In other words, when the free RNA is added to the complexed RNA, preferably no free or substantially no free (poly-)cationic compound is present, which could form a complex with said free RNA. Accordingly, the free RNA of the inventive (pharmaceutical) composition or vaccine can efficiently be transcribed in vivo.

[0597] It may be preferred that the free RNA may be identical or different to the complexed RNA, depending on the specific requirements of therapy. Even more preferably, the free RNA, which is comprised in the (pharmaceutical) composition or vaccine, is identical to the complexed epitope-encoding RNA, in other words, the combination, (pharmaceutical) composition or vaccine comprises an otherwise identical RNA in both free and complexed form.

[0598] In particularly preferred embodiments, the inventive (pharmaceutical) composition or vaccine thus comprises the RNA as defined herein, wherein said RNA is present in said (pharmaceutical) composition or vaccine partially as free RNA and partially as complexed RNA. Preferably, the RNA as defined herein, preferably an mRNA, is complexed as described above and the same (m)RNA is then added in the form of free RNA, wherein preferably the compound, which is used for complexing the RNA is not present in free form in the composition at the moment of addition of the free RNA.

[0599] The ratio of the complexed RNA and the free RNA may be selected depending on the specific requirements of a particular therapy. Typically, the ratio of the complexed RNA and the free RNA is selected such that a significant stimulation of the innate immune system is elicited due to the presence of the complexed RNA. In parallel, the ratio is selected such that a significant amount of the free epitope-encoding RNA can be provided in vivo leading to an efficient translation and concentration of the expressed antigenic fusion protein in vivo. Preferably the ratio of the complexed RNA to free RNA in the inventive (pharmaceutical) composition or vaccine is selected from a range of about 5:1 (w/w) to about 1:10 (w/w), more preferably from a range of about 4:1 (w/w) to about 1:8 (w/w), even more preferably from a range of about 3:1 (w/w) to about 1:5 (w/w) or 1:3 (w/w), and most preferably about 1:1 (w/w).

[0600] Additionally or alternatively, the ratio of the complexed RNA and the free RNA may be calculated on the basis of the nitrogen/phosphate ratio (N/P-ratio) of the entire RNA complex. In the context of the present invention, an N/P-ratio is preferably in the range of about 0.1-10, preferably in a range of about 0.3-4 and most preferably in a range of about 0.5-2 or 0.7-2 regarding the ratio of RNA:peptide in the complex, and most preferably in the range of about 0.7-1.5.

[0601] Additionally or alternatively, the ratio of the complexed RNA and the free RNA may also be selected on the basis of the molar ratio of both RNAs to each other. Typically, the molar ratio of the complexed RNA to the free RNA may be selected such, that the molar ratio suffices the above (w/w) and/or N/P-definitions. More preferably, the molar ratio of the complexed RNA to the free RNA may be selected e.g. from a molar ratio of about 0.001:1, 0.01:1, 0.1:1, 0.2:1, 0.3:1, 0.4:1, 0.5:1, 0.6:1, 0.7:1, 0.8:1, 0.9:1, 1:1, 1:0.9, 1:0.8, 1:0.7, 1:0.6, 1:0.5, 1:0.4, 1:0.3, 1:0.2, 1:0.1, 1:0.01, 1:0.001, etc. or from any range formed by any two of the above values, e.g. a range selected from about 0.001:1 to 1:0.001, including a range of about 0.01:1 to 1:0.001, 0.1:1 to 1:0.001, 0.2:1 to 1:0.001, 0.3:1 to 1:0.001, 0.4:1 to 1:0.001, 0.5:1 to 1:0.001, 0.6:1 to 1:0.001, 0.7:1 to 1:0.001, 0.8:1 to 1:0.001, 0.9:1 to 1:0.001, 1:1 to 1:0.001, 1:0.9 to 1:0.001, 1:0.8 to 1:0.001, 1:0.7 to 1:0.001, 1:0.6 to 1:0.001, 1:0.5 to 1:0.001, 1:0.4 to 1:0.001, 1:0.3 to 1:0.001, 1:0.2 to 1:0.001, 1:0.1 to 1:0.001, 1:0.01 to 1:0.001, or a range of about 0.01:1 to 1:0.01, 0.1:1 to 1:0.01, 0.2:1 to 1:0.01, 0.3:1 to 1:0.01, 0.4:1 to 1:0.01, 0.5:1 to 1:0.01, 0.6:1 to 1:0.01, 0.7:1 to 1:0.01, 0.8:1 to 1:0.01, 0.9:1 to 1:0.01, 1:1 to 1:0.01, 1:0.9 to 1:0.01, 1:0.8 to 1:0.01, 1:0.7 to 1:0.01, 1:0.6 to 1:0.01, 1:0.5 to 1:0.01, 1:0.4 to 1:0.01, 1:0.3 to 1:0.01, 1:0.2 to 1:0.01, 1:0.1 to 1:0.01, 1:0.01 to 1:0.01, or including a range of about 0.001:1 to 1:0.01, 0.001:1 to 1:0.1, 0.001:1 to 1:0.2, 0.001:1 to 1:0.3, 0.001:1 to 1:0.4, 0.001:1 to 1:0.5, 0.001:1 to 1:0.6, 0.001:1 to 1:0.7, 0.001:1 to 1:0.8, 0.001:1 to 1:0.9, 0.001:1 to 1:1, 0.001 to 0.9:1, 0.001 to 0.8:1, 0.001 to 0.7:1, 0.001 to 0.6:1, 0.001 to 0.5:1, 0.001 to 0.4:1, 0.001 to 0.3:1, 0.001 to 0.2:1, 0.001 to 0.1:1, or a range of about 0.01:1 to 1:0.01, 0.01:1 to 1:0.1, 0.01:1 to 1:0.2, 0.01:1 to 1:0.3, 0.01:1 to 1:0.4, 0.01:1 to 1:0.5, 0.01:1 to 1:0.6, 0.01:1 to 1:0.7, 0.01:1 to 1:0.8, 0.01:1 to 1:0.9, 0.01:1 to 1:1, 0.001 to 0.9:1, 0.001 to 0.8:1, 0.001 to 0.7:1, 0.001 to 0.6:1, 0.001 to 0.5:1, 0.001 to 0.4:1, 0.001 to 0.3:1, 0.001 to 0.2:1, 0.001 to 0.1:1, etc.

[0602] Even more preferably, the molar ratio of the complexed RNA to the free RNA may be selected e.g. from a range of about 0.01:1 to 1:0.01. Most preferably, the molar ratio of the complexed RNA to the free RNA may be selected e.g. from a molar ratio of about 1:1. Any of the above definitions with regard to (w/w) and/or N/P ratio may also apply.

[0603] According to preferred embodiments, the (pharmaceutical) composition or vaccine comprises another nucleic acid, preferably as an adjuvant.

[0604] Accordingly, the (pharmaceutical) composition or vaccine of the invention further comprises a non-coding nucleic acid, preferably RNA, selected from the group consisting of small interfering RNA (siRNA), antisense RNA (asRNA), circular RNA (circRNA), ribozymes, aptamers, riboswitches, immunostimulating RNA (isRNA), transfer RNA (tRNA), ribosomal RNA (rRNA), small nuclear RNA (snRNA), small nucleolar RNA (snoRNA), microRNA (miRNA), and Piwi-interacting RNA (piRNA).

[0605] In the context of the present invention, non-coding nucleic acids, preferably RNAs, of particular interest include “immune-stimulatory” or “is” nucleic acids, preferably RNAs. “Immune-stimulatory” or “is” nucleic acids or RNAs are typically employed as adjuvants in the (pharmaceutical) composition or vaccine according to the invention.

[0606] According to a particularly preferred embodiment, the adjuvant nucleic acid comprises a nucleic acid of the following formula (VI) or (VII):

GₗXₘGₙ (formula (VI))

wherein:
G is a nucleotide comprising guanine, uracil or an analogue of guanine or uracil;
X is a nucleotide comprising guanine, uracil, adenine, thymine, cytosine or an analogue thereof;
l is an integer from 1 to 40,
wherein
when l=1 G is a nucleotide comprising guanine or an analogue thereof,
when l>1 at least 50% of the nucleotides comprise guanine or an analogue thereof;
m is an integer and is at least 3;
wherein
when m=3, X is a nucleotide comprising uracil or an analogue thereof,
when m>3, at least 3 successive nucleotides comprising uracils or analogues of uracil occur;
n is an integer from 1 to 40,
wherein
when n=1, G is a nucleotide comprising guanine or an analogue thereof,
when n>1, at least 50% of the nucleotides comprise guanine or an analogue thereof;

CₗXₘCₙ (formula (VII))

wherein:
C is a nucleotide comprising cytosine, uracil or an analogue of cytosine or uracil;
X is a nucleotide comprising guanine, uracil, adenine, thymine, cytosine or an analogue thereof;
l is an integer from 1 to 40,
wherein
when l=1, C is a nucleotide comprising cytosine or an analogue thereof,
when l>1, at least 50% of the nucleotides comprise cytosine or an analogue thereof;
m is an integer and is at least 3;
wherein
when m=3, X comprises uracil or an analogue thereof,
when m>3, at least 3 successive nucleotides comprise uracils or analogues of uracil occur;
n is an integer from 1 to 40,
wherein
when n=1, C is a nucleotide comprising cytosine or an analogue thereof,
when n>1, at least 50% of the nucleotides comprise cytosine or an analogue thereof.

[0607] The nucleic acids of formula (VI) or (VII), which may be used as isRNA may be relatively short nucleic acid molecules with a typical length of approximately from 5 to 100 (but may also be longer than 100 nucleotides for specific embodiments, e.g. up to 200 nucleotides), from 5 to 90 or from 5 to 80 nucleotides, preferably a length of approximately from 5 to 70, more preferably a length of approximately from 8 to 60 and, more preferably a length of approximately from 15 to 60 nucleotides, more preferably from 20 to 60, most preferably from 30 to 60 nucleotides. If the epitope-encoding RNA (or any other nucleic acid, in particular RNA, as disclosed herein) has a maximum length of, for example, 100 nucleotides, m will typically be ≤98.

[0608] The number of nucleotides “G” in the nucleic acid of formula (VI) is determined by l or n. l and n, independently of one another, are each an integer from 1 to 40, wherein when l or n=1 G is a nucleotide comprising guanine or an analogue thereof, and when l or n>1 at least 50% of the nucleotides comprise guanine, or an analogue thereof.

[0609] For example, without implying any limitation, when l or n=4 Gl or Gn can be, for example, a GUGU, GGUU, UGUG, UUGG, GUUG, GGGU, GGUG, GUGG, UGGG or GGGG, etc.; when l or n=5 Gl or Gn can be, for example, a GGGUU, GGUGU, GUGGU, UGGGU, UGGUG, UGUGG, UUGGG, GUGUG, GGGGU, GGGUG, GGUGG, GUGGG, UGGGG, or GGGGG, etc.

[0610] A nucleotide adjacent to Xm in the nucleic acid of formula (VI) preferably does not comprise uracil.

[0611] Similarly, the number of nucleotides “C” in the nucleic acid of formula (VII) is determined by l or n. l and n, independently of one another, are each an integer from 1 to 40, wherein when l or n=1 C is a nucleotide comprising cytosine or an analogue thereof, and when l or n>1 at least 50% of the nucleotides comprise cytosine or an analogue thereof.

[0612] For example, without implying any limitation, when l or n=4, Cl or Cn can be, for example, a CUCU, CCUU, UCUC, UUCC, CUUC, CCCU, CCUC, CUCC, UCCC or CCCC, etc.; when l or n=5 Cl or Cn can be, for example, a CCCUU, CCUCU, CUCCU, UCCCU, UCCUC, UCUCC, UUCCC, CUCUC, CCCCU, CCCUC, CCUCC, CUCCC, UCCCC, or CCCCC, etc.

[0613] A nucleotide adjacent to Xm in the nucleic acid of formula (VII) preferably does not comprise uracil. Preferably, for formula (VI), when l or n>1, at least 60%, 70%, 80%, 90% or even 100% of the nucleotides comprise guanine or an analogue thereof, as defined above.

[0614] The remaining nucleotides to 100% (when nucleotides comprising guanine constitutes less than 100% of the nucleotides) in the flanking sequences G1 and/or Gn are uridine or an analogue thereof, as defined hereinbefore. Also preferably, l and n, independently of one another, are each an integer from 2 to 30, more preferably an integer from 2 to 20 and yet more preferably an integer from 2 to 15. The lower limit of l or n can be varied if necessary and is at least 1, preferably at least 2, more preferably at least 3, 4, 5, 6, 7, 8, 9 or 10. This definition applies correspondingly to formula (VII).

[0615] According to a further preferred embodiment, the isRNA as described herein consists of or comprises a nucleic acid of formula (VIII) or (IX):

(NᵤGₗXₘGₙNᵥ)ₐ (formula (VIII))

wherein:
G is a nucleotide comprising guanine, uracil or an analogue of guanine or uracil, preferably comprising guanine or an analogue thereof;
X is a nucleotide comprising guanine, uracil, adenine, thymine, cytosine, or an analogue thereof, preferably comprising uracil or an analogue thereof;
N is a nucleic acid sequence having a length of about 4 to 50, preferably of about 4 to 40, more preferably of about 4 to 30 or 4 to 20 nucleic acids, each N independently being selected from a nucleotide comprising guanine, uracil, adenine, thymine, cytosine or an analogue thereof;
a is an integer from 1 to 20, preferably from 1 to 15, most preferably from 1 to 10;
l is an integer from 1 to 40,
wherein when l=1, G is a nucleotide comprising guanine or an analogue thereof,
when l>1, at least 50% of these nucleotides comprise guanine or an analogue thereof;
m is an integer and is at least 3;
wherein when m=3, X is a nucleotide comprising uracil or an analogue thereof, and
when m>3, at least 3 successive nucleotides comprising uracils or analogues of uracils occur;
n is an integer from 1 to 40,
wherein when n=1, G is a nucleotide comprising guanine or an analogue thereof,
when n>1, at least 50% of these nucleotides comprise guanine or an analogue thereof;
u,v may be independently from each other an integer from 0 to 50,
preferably wherein when u=0, v≥1, or when v=0, u≥1;
wherein the nucleic acid molecule of formula (VIII) has a length of at least 50 nucleotides, preferably of at least 100 nucleotides, more preferably of at least 150 nucleotides, even more preferably of at least 200 nucleotides and most preferably of at least 250 nucleotides.

(NᵤCₗXₘCₙNᵥ)ₐ (formula (IX))

wherein:
C is a nucleotide comprising cytosine, uracil or an analogue of cytosine or uracil, preferably cytosine or an analogue thereof;
X is a nucleotide comprising guanine, uracil, adenine, thymine, cytosine or an analogue thereof, preferably comprising uracil or an analogue thereof;
N is each a nucleic acid sequence having independent from each other a length of about 4 to 50, preferably of about 4 to 40, more preferably of about 4 to 30 or 4 to 20 nucleic acids, each N independently being selected from a nucleotide comprising guanine, uracil, adenine, thymine, cytosine or an analogue thereof;
a is an integer from 1 to 20, preferably from 1 to 15, most preferably from 1 to 10;
l is an integer from 1 to 40,
wherein when l=1, C is a nucleotide comprising cytosine or an analogue thereof,
when l>1, at least 50% of these nucleotides comprise cytosine or an analogue thereof;
m is an integer and is at least 3;
wherein when m=3, X is a nucleotide comprising uracil or an analogue thereof,
when m>3, at least 3 successive nucleotides comprising uracils or analogues of uracil occur;
n is an integer from 1 to 40,
wherein when n=1, C is a nucleotide comprising cytosine or an analogue thereof,
when n>1, at least 50% of these nucleotides comprise cytosine or an analogue thereof.
u, v may be independently from each other an integer from 0 to 50,
preferably wherein when u=0, v≥1, or when v=0, u≥1;
wherein the nucleic acid molecule of formula (IX) according to the invention has a length of at least 50 nucleotides, preferably of at least 100 nucleotides, more preferably of at least 150 nucleotides, even more preferably of at least 200 nucleotides and most preferably of at least 250 nucleotides.

[0616] For formula (IX), any of the definitions given above for elements N (i.e. Nu and Nv) and X (Xm), particularly the core structure as defined above, as well as for integers a, l, m, n, u and v, similarly apply to elements of formula (V) correspondingly, wherein in formula (IX) the core structure is defined by CₗXₘCₙ. The definition of bordering elements Nu and Nv is identical to the definitions given above for Nu and Nv.

[0617] In particular in the context of formulas (VI)-(IX) above, a “nucleotide” is understood as a molecule comprising or preferably consisting of a nitrogenous base (preferably selected from adenine (A), cytosine (C), guanine (G), thymine (T), or uracil (U), a pentose sugar (ribose or deoxyribose), and at least one phosphate group. “Nucleosides” consist of a nucleobase and a pentose sugar (i.e. could be referred to as “nucleotides without phosphate groups”). Thus, a “nucleotide” comprising a specific base (A, C, G, T or U) preferably also comprises the respective nucleoside (adenosine, cytidine, guanosine, thymidine or uridine, respectively) in addition to one (two, three or more) phosphate groups

[0618] That is, the term “nucleotides” includes nucleoside monophosphates (AMP, CMP, GMP, TMP and UMP), nucleoside diphosphates (ADP, CDP, GDP, TDP and UDP), nucleoside triphosphates (ATP, CTP, GTP, TTP and UTP). In the context of formulas (VI)-(IX) above, nucleoside monophosphates are particularly preferred. The expression “a nucleotide comprising ( . . . ) or an analogue thereof” refers to modified nucleotides comprising a modified (phosphate) backbone, pentose sugar(s), or nucleobases. In this context, modifications of the nucleobases are particularly preferred. By way of example, when referring “to a nucleotide comprising guanine, uracil, adenine, thymine, cytosine or an analogue thereof”, the term “analogue thereof” refers to both the nucleotide and the recited nucleobases, preferably to the recited nucleobases.

[0619] In preferred embodiments, the (pharmaceutical) composition or vaccine of the invention comprises at least one immunostimulating RNA comprising or consisting of a nucleic acid sequence according to formula (VI) (GₗXₘGₙ), formula (VII) (CₗXₘCₙ), formula (VIII) (NᵤGₗXₘGₙNᵥ)ₐ, and/or formula (IX) (NᵤCₗXₘCₙNᵥ)ₐ). In particularly preferred embodiments, the (pharmaceutical) composition or vaccine of the invention comprises at least one immunostimulating RNA comprising or consisting of a nucleic acid sequence according to any SEQ ID NO as shown in WO2008014979, WO2009030481, WO2009095226, or WO2015149944.

[0620] In particularly preferred embodiments, the (pharmaceutical) composition or vaccine of the invention comprises a polymeric carrier cargo complex, formed by a polymeric carrier, preferably comprising disulfide-crosslinked cationic peptides, preferably Cys-Arg₁₂, and/or Cys-Arg₁₂-Cys, and at least one isRNA, preferably comprising or consisting of a nucleic acid sequence according to any SEQ ID NO as shown in WO2008014979, WO2009030481, WO2009095226, or WO2015149944.

[0621] The (pharmaceutical) composition or vaccine of the invention may additionally contain one or more auxiliary substances in order to increase its immunogenicity or immunostimulatory capacity, if desired. A synergistic action of the inventive polymeric carrier cargo complex as defined herein and of an auxiliary substance, which may be optionally contained in the (pharmaceutical) composition or vaccine of the invention as defined herein, is preferably achieved thereby. Depending on the various types of auxiliary substances, various mechanisms can come into consideration in this respect. For example, compounds that permit the maturation of dendritic cells (DCs), for example lipopolysaccharides, TNF-alpha or CD40 ligand, form a first class of suitable auxiliary substances. In general, it is possible to use as auxiliary substance any agent that influences the immune system in the manner of a “danger signal” (LPS, GP96, etc.) or cytokines, such as GM-CFS, which allow an immune response to be enhanced and/or influenced in a targeted manner. Particularly preferred auxiliary substances are cytokines, such as monokines, lymphokines, interleukins or chemokines, that further promote the innate immune response, such as IL-1, IL-2, IL-3, IL-4, IL-5, IL-6, IL-7, IL-8, IL-9, IL-10, IL-12, IL-13, IL-14, IL-15, IL-16, IL-17, IL-18, IL-19, IL-20, IL-21, IL-22, IL-23, IL-24, IL-25, IL-26, IL-27, IL-28, IL-29, IL-30, IL-31, IL-32, IL-33, INF-alpha, IFN-beta, INF-gamma, GM-CSF, G-CSF, M-CSF, LT-beta or TNF-alpha, growth factors, such as hGH.

[0622] The (pharmaceutical) composition or vaccine of the invention may additionally contain any further compound, which is known to be immunostimulating due to its binding affinity (as ligands) to human Toll-like receptors TLR1, TLR2, TLR3, TLR4, TLR5, TLR6, TLR7, TLR8, TLR9, TLR10, or due to its binding affinity (as ligands) to murine Toll-like receptors TLR1, TLR2, TLR3, TLR4, TLR5, TLR6, TLR7, TLR8, TLR9, TLR10, TLR11, TLR12 or TLR13.

[0623] The (pharmaceutical) composition or vaccine of the invention may additionally contain CpG nucleic acids, in particular CpG-RNA or CpG-DNA. A CpG-RNA or CpG-DNA can be a single-stranded CpG-DNA (ss CpG-DNA), a double-stranded CpG-DNA (dsDNA), a single-stranded CpG-RNA (ss CpG-RNA) or a double-stranded CpG-RNA (ds CpG-RNA). The CpG nucleic acid is preferably in the form of CpG-RNA, more preferably in the form of single-stranded CpG-RNA (ss CpG-RNA). The CpG nucleic acid preferably contains at least one or more (mitogenic) cytosine/guanine dinucleotide sequence(s) (CpG motif(s)). According to a first preferred alternative, at least one CpG motif contained in these sequences, that is to say the C (cytosine) and the G (guanine) of the CpG motif, is unmethylated. All further cytosines or guanines optionally contained in these sequences can be either methylated or unmethylated. According to a further preferred alternative, however, the C (cytosine) and the G (guanine) of the CpG motif can also be present in methylated form.

### Kit

[0624] In a further aspect, the present invention relates to a kit or kit-of-parts comprising the artificial nucleic acid (RNA) molecule, and/or the (pharmaceutical) composition or vaccine of the invention.

[0625] In the inventive kit or kit-of-parts, the at least one artificial nucleic acid (RNA) molecule in lyophilized or liquid form, optionally together with one or more pharmaceutically acceptable carrier(s), excipients or further agents as described above in the context of the pharmaceutical composition.

[0626] Optionally, the kit or kit-of-parts of the invention may comprise at least one further agent as defined herein in the context of the pharmaceutical composition, antimicrobial agents, RNAse inhibitors, solubilizing agents or the like.

[0627] The kit-of-parts may be a kit of two or more parts and typically comprises its components in suitable containers. For example, each container may be in the form of vials, bottles, squeeze bottles, jars, sealed sleeves, envelopes or pouches, tubes or blister packages or any other suitable form provided the container is configured so as to prevent premature mixing of components. Each of the different components may be provided separately, or some of the different components may be provided together (i.e. in the same container).

[0628] A container may also be a compartment or a chamber within a vial, a tube, a jar, or an envelope, or a sleeve, or a blister package or a bottle, provided that the contents of one compartment are not able to associate physically with the contents of another compartment prior to their deliberate mixing by a pharmacist or physician.

[0629] The kit-of-parts may furthermore contain technical instructions with information on the administration and dosage of any of its components.

### Medical Use and Treatment

[0630] The artificial nucleic acid (RNA) molecule, or the (pharmaceutical) composition or vaccine or kit of the invention may be used for human and also for veterinary medical purposes, preferably for human medical purposes.

[0631] According to a further aspect, the invention thus relates to the artificial nucleic acid (RNA) molecule, (pharmaceutical) composition or vaccine or kit of the invention for use as a medicament.

[0632] The artificial nucleic acid (RNA) molecule, (pharmaceutical) composition or vaccine or kit of the invention may be used for treatment of genetic diseases, cancer, autoimmune diseases, inflammatory diseases, and infectious diseases, or other diseases or conditions.

[0633] According to a further aspect, the invention thus relates to the artificial nucleic acid (RNA) molecule, (pharmaceutical) composition or vaccine or kit of the invention for use in a method of treatment of genetic diseases, cancer, autoimmune diseases, inflammatory diseases, and infectious diseases, or other diseases or conditions.

[0634] “Gene therapy” preferably involves modulating (i.e. restoring, enhancing, decreasing or inhibiting) gene expression in a subject in order to achieve a therapeutic effect. To this end, gene therapy typically encompasses the introduction of nucleic acids into cells. The term generally refers to the manipulation of a genome for therapeutic purposes and includes the use of genome-editing technologies for correction of mutations that cause disease, the addition of therapeutic genes to the genome, the removal of deleterious genes or genome sequences, and the modulation of gene expression. Gene therapy may involve in vivo or ex vivo transformation of the host cells.

[0635] The term “treatment” or “treating” of a disease includes preventing or protecting against the disease (that is, causing the clinical symptoms not to develop); inhibiting the disease (i.e., arresting or suppressing the development of clinical symptoms; and/or relieving the disease (i.e., causing the regression of clinical symptoms). As will be appreciated, it is not always possible to distinguish between “preventing” and “suppressing” a disease or disorder since the ultimate inductive event or events may be unknown or latent. Accordingly, the term “prophylaxis” will be understood to constitute a type of “treatment” that encompasses both “preventing” and “suppressing.” The term “treatment” thus includes “prophylaxis”.

[0636] The term “subject”, “patient” or “individual” as used herein generally includes humans and non-human animals and preferably mammals (e.g., non-human primates, including marmosets, tamarins, spider monkeys, owl monkeys, vervet monkeys, squirrel monkeys, and baboons, macaques, chimpanzees, orangutans, gorillas; cows; horses; sheep; pigs; chicken; cats; dogs; mice; rat; rabbits; guinea pigs; etc.), including chimeric and transgenic animals and disease models. In the context of the present invention, the term “subject” preferably refers a non-human primate or a human, most preferably a human.

[0637] Accordingly, the present invention further provides methods of treating a disease as disclosed herein, by administering to a subject in need thereof a pharmaceutically effective amount of the artificial nucleic acid (RNA) molecule, (pharmaceutical) composition or vaccine or kit. Such methods may comprise an optional first step of preparing the inventive artificial nucleic acid (RNA) molecule, (pharmaceutical) composition or vaccine or kit, and a second step, comprising administering (a pharmaceutically effective amount of) said artificial nucleic acid (RNA) molecule, (pharmaceutical) composition or vaccine or kit to a patient/subject in need thereof.

### Administration Routes

[0638] The inventive artificial nucleic acid (RNA) molecule, the (pharmaceutical) composition or vaccine or kit may be administered, for example, systemically or locally.

[0639] Routes for systemic administration in general include, for example, transdermal, oral, parenteral routes, including subcutaneous, intravenous, intramuscular, intraarterial, intradermal and intraperitoneal injections and/or intranasal administration routes.

[0640] Routes for local administration in general include, for example, topical administration routes but also intradermal, transdermal, subcutaneous, or intramuscular injections or intralesional, intratumoral, intracranial, intrapulmonal, intracardial, and sublingual injections.

[0641] In case more than one different artificial nucleic acid (RNA) molecule is to be administered, different administration routes can be used for each of said different artificial nucleic acid (RNA) molecules.

[0642] According to preferred embodiments, the artificial nucleic acid (RNA) molecule, (pharmaceutical) composition or vaccine or kit is administered by a parenteral route, preferably via intradermal, subcutaneous, or intramuscular routes. Preferably, said artificial nucleic acid (RNA) molecule, (pharmaceutical) composition or vaccine or kit may be administered by injection, e.g. subcutaneous, intramuscular or intradermal injection, which may be needle-free and/or needle injection. Accordingly, in preferred embodiments, the medical use and/or method of treatment according to the present invention involves administration of said artificial nucleic acid (RNA) molecule, (pharmaceutical) composition or vaccine or kit by subcutaneous, intramuscular or intradermal injection, preferably by intramuscular or intradermal injection, more preferably by intradermal injection. Such injection may be carried out by using conventional needle injection or (needle-free) jet injection, preferably by using (needle-free) jet injection.

### Administration Regimen

[0643] The artificial nucleic acid (RNA) molecule, (pharmaceutical) composition or vaccine or kit of the invention may be administered to a subject in need thereof several times a day, daily, every other day, weekly, or monthly; and may be administered sequentially or simultaneously.

[0644] In case different artificial nucleic acid (RNA) molecules are administered, or the (pharmaceutical) composition or vaccine or kit comprises several components, e.g. different artificial nucleic acid (RNA) molecules and optionally additional active agents as described herein, each component may be administered simultaneously (at the same time via the same or different administration routes) or separately (at different times via the same or different administration routes). Such a sequential administration scheme is also referred to as “time-staggered” administration. Time-staggered administration may mean that an artificial nucleic acid (RNA) molecule of the invention is administrated e.g. prior, concurrent or subsequent to a different artificial nucleic acid (RNA) molecule of the invention, or any other additional active agent.

### Dose

[0645] The inventive artificial nucleic acid (RNA) molecule, (pharmaceutical) composition or vaccine or kit may preferably be administered in a safe and therapeutically effective amount.

[0646] As used herein, “safe and (therapeutically) effective amount” means an amount of the active agent(s) that is sufficient to elicit a desired biological or medicinal response in a tissue, system, animal or human that is being sought. A safe and therapeutically effective amount is preferably sufficient for the inducing a positive modification of the disease to be treated, i.e. for alleviation of the symptoms of the disease being treated, reduction of disease progression, or prophylaxis of the symptoms of the disease being prevented. At the same time, however, a “safe and therapeutically effective amount” is preferably small enough to avoid serious side-effects, that is to say to permit a sensible relationship between advantage and risk.

[0647] A “safe and (therapeutically) effective amount” will furthermore vary in connection with the particular condition to be treated and also with the age, physical condition, body weight, sex and diet of the patient to be treated, the severity of the condition, the duration of the treatment, the nature of the accompanying therapy, of the particular pharmaceutically acceptable carrier or excipient used, the treatment regimen and similar factors.

[0648] A “safe and (therapeutically) effective amount” of the artificial nucleic acid (RNA) molecule, may furthermore be selected depending on the type of artificial nucleic acid (RNA) molecule, e.g. monocistronic, bi- or even multicistronic RNA, since a bi- or even multicistronic RNA may lead to a significantly higher expression of the encoded (poly-)peptide or protein of interest an equal amount of a monocistronic RNA.

[0649] Therapeutic efficacy and toxicity of the inventive artificial nucleic acid (RNA) molecule, (pharmaceutical) composition or vaccine or kit may be determined by standard pharmaceutical procedures in cell cultures or experimental animals, e.g., for determining the LD50 (the dose lethal to 50% of the population) and the ED50 (the dose therapeutically effective in 50% of the population). Exemplary animal models suitable for determining a “safe and (therapeutically) effective amount of artificial nucleic acid (RNA) molecules, (pharmaceutical) compositions or kits disclosed herein include, without implying any limitation, rabbit, sheep, mouse, rat, dog and non-human primate models. The dose ratio between toxic and therapeutic effects is the therapeutic index and can be expressed as the ratio LD50/ED50. Artificial nucleic acid (RNA) molecules, (pharmaceutical) compositions or kits which exhibit large therapeutic indices are generally preferred. The data obtained from the cell culture assays and animal studies can be used in formulating a range of dosage for use in humans. The dosage of such compounds lies preferably within a range of circulating concentrations that include the ED50 with little or no toxicity.

[0650] For instance, therapeutically effective doses of the inventive artificial nucleic acid (RNA) molecule, (pharmaceutical) composition or vaccine or kit described herein may range from about 0.001 mg to 10 mg, preferably from about 0.01 mg to 5 mg, more preferably from about 0.1 mg to 2 mg per dosage unit or from about 0.01 nmol to 1 mmol per dosage unit, in particular from 1 nmol to 1 mmol per dosage unit, preferably from 1 pmol to 1 mmol per dosage unit. It is also envisaged that the therapeutically effective dose of the inventive artificial nucleic acid (RNA) molecule, (pharmaceutical) composition or vaccine or kit may range (per kg body weight) from about 0.01 mg/kg to 10 g/kg, preferably from about 0.05 mg/kg to 5 g/kg, more preferably from about 0.1 mg/kg to 2.5 g/kg.

### Genetic Diseases

[0651] In preferred embodiments, artificial nucleic acid (RNA) molecules, (pharmaceutical) composition or vaccine or kit is used for treatment or prophylaxis of genetic diseases.

[0652] As used herein, the term “genetic disease” includes any disease, disorder or conditions caused by, characterized by or related to abnormalities (i.e. deviations from the wild-type, healthy and non-symptomatic state) in the genome. Such abnormalities may include a change in chromosomal copy number (e.g., aneuploidy), or a portion thereof (e.g., deletions, duplications, amplifications); or a change in chromosomal structure (e.g., translocations, point mutations). Genomes abnormality may be hereditary (either recessive or dominant) or non-hereditary. Genome abnormalities may be present in some cells of an organism or in all cells of that organism and include autosomal, X-linked, Y-linked and mitochondrial abnormalities.

[0653] Further, the present invention allows treating all diseases, hereditary diseases or genetic diseases as mentioned in WO 2012/013326 A1, which is incorporated by reference in its entirety herein.

### Cancer

[0654] In preferred embodiments, artificial nucleic acid (RNA) molecules, (pharmaceutical) composition or vaccine or kit is used for treatment or prophylaxis of cancer.

[0655] As used herein, the term “cancer” refers to a neoplasm characterized by the uncontrolled and usually rapid proliferation of cells that tend to invade surrounding tissue and to metastasize to distant body sites. The term encompasses benign and malignant neoplasms. Malignancy in cancers is typically characterized by anaplasia, invasiveness, and metastasis; whereas benign malignancies typically have none of those properties. The terms includes neoplasms characterized by tumor growth as well as cancers of blood and lymphatic system.

[0656] In some embodiments, artificial nucleic acid (RNA) molecules, (pharmaceutical) composition or vaccine or kit according to the invention may be used as a medicament, in particular for treatment of tumor or cancer diseases. In this context, treatment preferably involves intratumoral application, especially by intratumoral injection. Accordingly, the artificial nucleic acid (RNA) molecules, (pharmaceutical) composition or vaccine or kit according to the invention may be used for preparation of a medicament for treatment of tumor or cancer diseases, said medicament being particularly suitable for intratumoral application (administration) for treatment of tumor or cancer diseases.

[0657] Preferably, tumor and cancer diseases as mentioned herein are selected from tumor or cancer diseases which preferably include e.g. Acute lymphoblastic leukemia, Acute myeloid leukemia, Adrenocortical carcinoma, AIDS-related cancers, AIDS-related lymphoma, Anal cancer, Appendix cancer, Astrocytoma, Basal cell carcinoma, Bile duct cancer, Bladder cancer, Bone cancer, Osteosarcoma/Malignant fibrous histiocytoma, Brainstem glioma, Brain tumor, cerebellar astrocytoma, cerebral astrocytoma/malignant glioma, ependymoma, medulloblastoma, supratentorial primitive neuroectodermal tumors, visual pathway and hypothalamic glioma, Breast cancer, Bronchial adenomas/carcinoids, Burkitt lymphoma, childhood Carcinoid tumor, gastrointestinal Carcinoid tumor, Carcinoma of unknown primary, primary Central nervous system lymphoma, childhood Cerebellar astrocytoma, childhood Cerebral astrocytoma/Malignant glioma, Cervical cancer, Childhood cancers, Chronic lymphocytic leukemia, Chronic myelogenous leukemia, Chronic myeloproliferative disorders, Colon Cancer, Cutaneous T-cell lymphoma, Desmoplastic small round cell tumor, Endometrial cancer, Ependymoma, Esophageal cancer, Ewing's sarcoma in the Ewing family of tumors, Childhood Extracranial germ cell tumor, Extragonadal Germ cell tumor, Extrahepatic bile duct cancer, Intraocular melanoma, Retinoblastoma, Gallbladder cancer, Gastric (Stomach) cancer, Gastrointestinal Carcinoid Tumor, Gastrointestinal stromal tumor (GIST), extracranial, extragonadal, or ovarian Germ cell tumor, Gestational trophoblastic tumor, Glioma of the brain stem, Childhood Cerebral Astrocytoma, Childhood Visual Pathway and Hypothalamic Glioma, Gastric carcinoid, Hairy cell leukemia, Head and neck cancer, Heart cancer, Hepatocellular (liver) cancer, Hodgkin lymphoma, Hypopharyngeal cancer, childhood Hypothalamic and visual pathway glioma, Intraocular Melanoma, Islet Cell Carcinoma (Endocrine Pancreas), Kaposi sarcoma, Kidney cancer (renal cell cancer), Laryngeal Cancer, Leukemias, acute lymphoblastic Leukemia, acute myeloid Leukemia, chronic lymphocytic Leukemia, chronic myelogenous Leukemia, hairy cell Leukemia, Lip and Oral Cavity Cancer, Liposarcoma, Liver Cancer, Non-Small Cell Lung Cancer, Small Cell Lung Cancer, Lymphomas, AIDS-related Lymphoma, Burkitt Lymphoma, cutaneous T-Cell Lymphoma, Hodgkin Lymphoma, Non-Hodgkin Lymphomas, Primary Central Nervous System Lymphoma, Waldenström Macroglobulinemia, Malignant Fibrous Histiocytoma of Bone/Osteosarcoma, Childhood Medulloblastoma, Melanoma, Intraocular (Eye) Melanoma, Merkel Cell Carcinoma, Adult Malignant Mesothelioma, Childhood Mesothelioma, Metastatic Squamous Neck Cancer with Occult Primary, Mouth Cancer, Childhood Multiple Endocrine Neoplasia Syndrome, Multiple Myeloma/Plasma Cell Neoplasm, Mycosis Fungoides, Myelodysplastic Syndromes, Myelodysplastic/Myeloproliferative Diseases, Chronic Myelogenous Leukemia, Adult Acute Myeloid Leukemia, Childhood Acute Myeloid Leukemia, Multiple Myeloma (Cancer of the Bone-Marrow), Chronic Myeloproliferative Disorders, Nasal cavity and paranasal sinus cancer, Nasopharyngeal carcinoma, Neuroblastoma, Oral Cancer, Oropharyngeal cancer, Osteosarcoma/malignant fibrous histiocytoma of bone, Ovarian cancer, Ovarian epithelial cancer (Surface epithelial-stromal tumor), Ovarian germ cell tumor, Ovarian low malignant potential tumor, Pancreatic cancer, islet cell Pancreatic cancer, Paranasal sinus and nasal cavity cancer, Parathyroid cancer, Penile cancer, Pharyngeal cancer, Pheochromocytoma, Pineal astrocytoma, Pineal germinoma, childhood Pineoblastoma and supratentorial primitive neuroectodermal tumors, Pituitary adenoma, Plasma cell neoplasia/Multiple myeloma, Pleuropulmonary blastoma, Primary central nervous system lymphoma, Prostate cancer, Rectal cancer, Renal cell carcinoma (kidney cancer), Cancer of the Renal pelvis and ureter, Retinoblastoma, childhood Rhabdomyosarcoma, Salivary gland cancer, Sarcoma of the Ewing family of tumors, Kaposi Sarcoma, soft tissue Sarcoma, uterine Sarcoma, Sezary syndrome, Skin cancer (nonmelanoma), Skin cancer (melanoma), Merkel cell Skin carcinoma, Small intestine cancer, Squamous cell carcinoma, metastatic Squamous neck cancer with occult primary, childhood Supratentorial primitive neuroectodermal tumor, Testicular cancer, Throat cancer, childhood Thymoma, Thymoma and Thymic carcinoma, Thyroid cancer, childhood Thyroid cancer, Transitional cell cancer of the renal pelvis and ureter, gestational Trophoblastic tumor, Urethral cancer, endometrial Uterine cancer, Uterine sarcoma, Vaginal cancer, childhood Visual pathway and hypothalamic glioma, Vulvar cancer, Waldenström macroglobulinemia, and childhood Wilms tumor (kidney cancer).

[0658] Further, the present invention allows treating all diseases or cancer diseases as mentioned in WO 2012/013326 A1 or WO 2017/109134 A1, which is incorporated by reference in its entirety herein.

### Infectious Diseases

[0659] In preferred embodiments, artificial nucleic acid (RNA) molecules, (pharmaceutical) composition or vaccine or kit is used for treatment or prophylaxis of infectious diseases.

[0660] The term “infection” or “infectious disease” relates to the invasion and multiplication of microorganisms such as bacteria, viruses, and parasites that are not normally present within the body. An infection may cause no symptoms and be subclinical, or it may cause symptoms and be clinically apparent. An infection may remain localized, or it may spread through the blood or lymphatic system to become systemic. Infectious diseases in this context, preferably include viral, bacterial, fungal or protozoological infectious diseases.

[0661] In particular, infectious diseases may be selected from, Acinetobacter infections, African sleeping sickness (African trypanosomiasis), AIDS (Acquired immunodeficiency syndrome), Amoebiasis, Anaplasmosis, Anthrax, Appendicitis, Arcanobacterium haemolyticum infections, Argentine hemorrhagic fever, Ascariasis, Aspergillosis, Astrovirus infections, Athlete's foot, Babesiosis, Bacillus cereus infections, Bacterial meningitis, Bacterial pneumonia, Bacterial vaginosis (BV), Bacteroides infections, Balantidiasis, Baylisascaris infections, Bilharziosis, BK virus infections, Black piedra, Blastocystis hominis infections, Blastomycosis, Bolivian hemorrhagic fever, Borrelia infections (Borreliosis), Botulism (and Infant botulism), Bovine tapeworm, Brazilian hemorrhagic fever, Brucellosis, Burkholderia infections, Buruli ulcer, Calicivirus infections (Norovirus and Sapovirus), Campylobacteriosis, Candidiasis (Candidosis), Canine tapeworm infections, Cat-scratch disease, Chagas Disease (American trypanosomiasis), Chancroid, Chickenpox, Chlamydia infections, Chlamydia trachomatis infections, Chlamydophila pneumoniae infections, Cholera, Chromoblastomycosis, Climatic bubo, Clonorchiasis, Clostridium difficile infections, Coccidioidomycosis, Cold, Colorado tick fever (CTF), Common cold (Acute viral rhinopharyngitis; Acute coryza), Condyloma acuminata, Conjunctivitis, Creutzfeldt-Jakob disease (CJD), Crimean-Congo hemorrhagic fever (CCHF), Cryptococcosis, Cryptosporidiosis, Cutaneous larva migrans (CLM), Cutaneous Leishmaniosis, Cyclosporiasis, Cysti-cercosis, Cytomegalovirus infections, Dengue fever, Dermatophytosis, Dienta-moebiasis, Diphtheria, Diphyllobothriasis, Donavanosis, Dracunculiasis, Early summer meningoencephalitis (FSME), Ebola hemorrhagic fever, Echinococcosis, Ehrlichiosis, Enterobiasis (Pinworm infections), Enterococcus infections, Enterovirus infections, Epidemic typhus, Epiglottitis, Epstein-Barr Virus Infectious Mononucleosis, Erythema infectiosum (Fifth disease), Exanthem subitum, Fasciolopsiasis, Fasciolosis, Fatal familial insomnia (FFI), Fifth disease, Filariasis, Fish poisoning (Ciguatera), Fish tapeworm, Flu, Food poisoning by Clostridium perfringens, Fox tapeworm, Free-living amebic infections, Fusobacterium infections, Gas gangrene, Geotrichosis, Gerstmann-Straussler-Scheinker syndrome (GSS), Giardiasis, Glanders, Gnathostomiasis, Gonorrhea, Granuloma inguinale (Donovanosis), Group A streptococcal infections, Group B streptococcal infections, Haemophilus influenzae infections, Hand foot and mouth disease (HFMD), Hantavirus Pulmonary Syndrome (HPS), Helicobacter pylori infections, Hemolytic-uremic syndrome (HUS), Hemorrhagic fever with renal syndrome (HFRS), Henipavirus infections, Hepatitis A, Hepatitis B, Hepatitis C, Hepatitis D, Hepatitis E, Herpes simplex, Herpes simplex type I, Herpes simplex type II, Herpes zoster, Histoplasmosis, Hollow warts, Hookworm infections, Human bocavirus infections, Human ewingii ehrlichiosis, Human granulocytic anaplasmosis (HGA), Human metapneumovirus infections, Human monocytic ehrlichiosis, Human papillomavirus (HPV) infections, Human parainfluenza virus infections, Hymenolepiasis, Influenza, Isosporiasis, Japanese encephalitis, Kawasaki disease, Keratitis, Kingella kingae infections, Kuru, Lambliasis (Giardiasis), Lassa fever, Legionellosis (Legionnaires' disease, Pontiac fever), Leishmaniasis, Leprosy, Leptospirosis, Lice, Listeriosis, Lyme borreliosis, Lyme disease, Lymphatic filariasis (Elephantiasis), Lymphocytic choriomeningitis, Malaria, Marburg hemorrhagic fever (MHF), Marburg virus, Measles, Melioidosis (Whitmore's disease), Meningitis, Meningococcal disease, Metagonimiasis, Microsporidiosis, Miniature tapeworm, Miscarriage (prostate inflammation), Molluscum contagiosum (MC), Mononucleosis, Mumps, Murine typhus (Endemic typhus), Mycetoma, Mycoplasma hominis, Mycoplasma pneumonia, Myiasis, Nappy/diaper dermatitis, Neonatal conjunctivitis (Ophthalmia neonatorum), Neonatal sepsis (Chorioamnionitis), Nocardiosis, Noma, Norwalk virus infections, Onchocerciasis (River blindness), Osteomyelitis, Otitis media, Paracoccidioidomycosis (South American blastomycosis), Paragonimiasis, Paratyphus, Pasteurellosis, Pediculosis capitis (Head lice), Pediculosis corporis (Body lice), Pediculosis pubis (Pubic lice, Crab lice), Pelvic inflammatory disease (PID), Pertussis (Whooping cough), Pfeiffer's glandular fever, Plague, Pneumococcal infections, Pneumocystis pneumonia (PCP), Pneumonia, Polio (childhood lameness), Poliomyelitis, Porcine tapeworm, Prevotella infections, Primary amoebic meningoencephalitis (PAM), Progressive multifocal leukoencephalopathy, Pseudo-croup, Psittacosis, Q fever, Rabbit fever, Rabies, Rat-bite fever, Reiter's syndrome, Respiratory syncytial virus infections (RSV), Rhinosporidiosis, Rhinovirus infections, Rickettsial infections, Rickettsialpox, Rift Valley fever (RVF), Rocky mountain spotted fever (RMSF), Rotavirus infections, Rubella, Salmonella paratyphus, Salmonella typhus, Salmonellosis, SARS (Severe Acute Respiratory Syndrome), Scabies, Scarlet fever, Schistosomiasis (Bilharziosis), Scrub typhus, Sepsis, Shigellosis (Bacillary dysentery), Shingles, Smallpox (Variola), Soft chancre, Sporotrichosis, Staphylococcal food poisoning, Staphylococcal infections, Strongyloidiasis, Syphilis, Taeniasis, Tetanus, Three-day fever, Tick-borne encephalitis, Tinea barbae (Barber's itch), Tinea capitis (Ringworm of the Scalp), Tinea corporis (Ringworm of the Body), Tinea cruris (Jock itch), Tinea manuum (Ringworm of the Hand), Tinea nigra, Tinea pedis (Athlete's foot), Tinea unguium (Onychomycosis), Tinea versicolor (Pityriasis versicolor), Toxocariasis (Ocular Larva Migrans (OLM) and Visceral Larva Migrans (VLM)), Toxoplasmosis, Trichinellosis, Trichomoniasis, Trichuriasis (Whipworm infections), Tripper, Trypanosomiasis (sleeping sickness), Tsutsugamushi disease, Tuberculosis, Tularemia, Typhus, Typhus fever, Ureaplasma urealyticum infections, Vaginitis (Colpitis), Variant Creutzfeldt-Jakob disease (vCJD, nvCJD), Venezuelan equine encephalitis, Venezuelan hemorrhagic fever, Viral pneumonia, Visceral Leishmaniosis, Warts, West Nile Fever, Western equine encephalitis, White piedra (Tinea blanca), Whooping cough, Yeast fungus spots, Yellow fever, Yersinia pseudotuberculosis infections, Yersiniosis, and Zygomycosis.

[0662] Further infectious diseases include infections caused by Acinetobacter baumannii, Anaplasma genus, Anaplasma phagocytophilum, Ancylostoma braziliense, Ancylostoma duodenale, Arcanobacterium haemolyticum, Ascaris lumbricoides, Aspergillus genus, Astroviridae, Babesia genus, Bacillus anthracis, Bacillus cereus, Bartonella henselae, BK virus, Blastocystis hominis, Blastomyces dermatitidis, Bordetella pertussis, Borrelia burgdorferi, Borrelia genus, Borrelia spp, Brucella genus, Brugia malayi, Bunyaviridae family, Burkholderia cepacia and other Burkholderia species, Burkholderia mallei, Burkholderia pseudomallei, Caliciviridae family, Campylobacter genus, Candida albicans, Candida spp, Chlamydia trachomatis, Chlamydophila pneumoniae, Chlamydophila psittaci, CJD prion, Clonorchis sinensis, Clostridium botulinum, Clostridium difficile, Clostridium perfringens, Clostridium perfringens, Clostridium spp, Clostridium tetani, Coccidioides spp, coronaviruses, Corynebacterium diphtheriae, Coxiella burnetii, Crimean-Congo hemorrhagic fever virus, Cryptococcus neoformans, Cryptosporidium genus, Cytomegalovirus, Dengue viruses (DEN-1, DEN-2, DEN-3 and DEN-4), Dientamoeba fragilis, Ebolavirus (EBOV), Echinococcus genus, Ehrlichia chaffeensis, Ehrlichia ewingii, Ehrlichia genus, Entamoeba histolytica, Enterococcus genus, Enterovirus genus, Enteroviruses, mainly Coxsackie A virus and Enterovirus 71 (EV71), Epidermophyton spp, Epstein-Barr Virus (EBV), Escherichia coli O157:H7, O111 and O104:H4, Fasciola hepatica and Fasciola gigantica, FFI prion, Filarioidea superfamily, Flaviviruses, Francisella tularensis, Fusobacterium genus, Geotrichum candidum, Giardia intestinalis, Gnathostoma spp, GSS prion, Guanarito virus, Haemophilus ducreyi, Haemophilus influenzae, Helicobacter pylori, Henipavirus (Hendra virus Nipah virus), Hepatitis A Virus, Hepatitis B Virus, Hepatitis C Virus, Hepatitis D Virus, Hepatitis E Virus, Herpes simplex virus 1 and 2 (HSV-1 and HSV-2), Histoplasma capsulatum, HIV (Human immunodeficiency virus), Hortaea werneckii, Human bocavirus (HBoV), Human herpesvirus 6 (HHV-6) and Human herpesvirus 7 (HHV-7), Human metapneumovirus (hMPV), Human papillomavirus (HPV), Human parainfluenza viruses (HPIV), Japanese encephalitis virus, JC virus, Junin virus, Kingella kingae, Klebsiella granulomatis, Kuru prion, Lassa virus, Legionella pneumophila, Leishmania genus, Leptospira genus, Listeria monocytogenes, Lymphocytic choriomeningitis virus (LCMV), Machupo virus, Malassezia spp, Marburg virus, Measles virus, Metagonimus yokagawai, Microsporidia phylum, Molluscum contagiosum virus (MCV), Mumps virus, Mycobacterium leprae and Mycobacterium lepromatosis, Mycobacterium tuberculosis, Mycobacterium ulcerans, Mycoplasma pneumoniae, Naegleria fowleri, Necator americanus, Neisseria gonorrhoeae, Neisseria meningitidis, Nocardia asteroides, Nocardia spp, Onchocerca volvulus, Orientia tsutsugamushi, Orthomyxoviridae family, Paracoccidioides brasiliensis, Paragonimus spp, Paragonimus westermani, Parvovirus B19, Pasteurella genus, Plasmodium genus, Pneumocystis jirovecii, Poliovirus, Rabies virus, Respiratory syncytial virus (RSV), Rhinovirus, rhinoviruses, Rickettsia akari, Rickettsia genus, Rickettsia prowazekii, Rickettsia rickettsii, Rickettsia typhi, Rift Valley fever virus, Rotavirus, Rubella virus, Sabia virus, Salmonella genus, Sarcoptes scabiei, SARS coronavirus, Schistosoma genus, Shigella genus, Sin Nombre virus, Hantavirus, Sporothrix schenckii, Staphylococcus genus, Staphylococcus genus, Streptococcus agalactiae, Streptococcus pneumoniae, Streptococcus pyogenes, Strongyloides stercoralis, Taenia genus, Taenia solium, Tick-borne encephalitis virus (TBEV), Toxocara canis or Toxocara cati, Toxoplasma gondii, Treponema pallidum, Trichinella spiralis, Trichomonas vaginalis, Trichophyton spp, Trichuris trichiura, Trypanosoma brucei, Trypanosoma cruzi, Ureaplasma urealyticum, Varicella zoster virus (VZV), Varicella zoster virus (VZV), Variola major or Variola minor, vCJD prion, Venezuelan equine encephalitis virus, Vibrio cholerae, West Nile virus, Western equine encephalitis virus, Wuchereria bancrofti, Yellow fever virus, Yersinia enterocolitica, Yersinia pestis, and Yersinia pseudotuberculosis. In this context, an infectious disease, preferably a viral, bacterial or protozoan infectious diseases, is typically selected from influenza, malaria, SARS, yellow fever, AIDS, Lyme borreliosis, Leishmaniasis, anthrax, meningitis, viral infectious diseases such as AIDS, Condyloma acuminata, hollow warts, Dengue fever, three-day fever, Ebola virus, cold, early summer meningoencephalitis (FSME), flu, shingles, hepatitis, herpes simplex type I, herpes simplex type II, Herpes zoster, influenza, Japanese encephalitis, Lassa fever, Marburg virus, measles, foot-and-mouth disease, mononucleosis, mumps, Norwalk virus infection, Pfeiffer's glandular fever, smallpox, polio (childhood lameness), pseudo-croup, fifth disease, rabies, warts, West Nile fever, chickenpox, cytomegalic virus (CMV), bacterial infectious diseases such as miscarriage (prostate inflammation), anthrax, appendicitis, borreliosis, botulism, Camphylobacter, Chlamydia trachomatis (inflammation of the urethra, conjunctivitis), cholera, diphtheria, donavanosis, epiglottitis, typhus fever, gas gangrene, gonorrhoea, rabbit fever, Helicobacter pylori, whooping cough, climatic bubo, osteomyelitis, Legionnaire's disease, leprosy, listeriosis, pneumonia, meningitis, bacterial meningitis, anthrax, otitis media, Mycoplasma hominis, neonatal sepsis (Chorioamnionitis), noma, paratyphus, plague, Reiter's syndrome, Rocky Mountain spotted fever, Salmonella paratyphus, Salmonella typhus, scarlet fever, syphilis, tetanus, tripper, tsutsugamushi disease, tuberculosis, typhus, vaginitis (colpitis), soft chancre, and infectious diseases caused by parasites, protozoa or fungi, such as amoebiasis, bilharziosis, Chagas disease, Echinococcus, fish tapeworm, fish poisoning (Ciguatera), fox tapeworm, athlete's foot, canine tapeworm, candidosis, yeast fungus spots, scabies, cutaneous Leishmaniosis, lambliasis (giardiasis), lice, malaria, microscopy, onchocercosis (river blindness), fungal diseases, bovine tapeworm, schistosomiasis, porcine tapeworm, toxoplasmosis, trichomoniasis, trypanosomiasis (sleeping sickness), visceral Leishmaniosis, nappy/diaper dermatitis or miniature tapeworm.

### Autoimmune Diseases

[0663] In preferred embodiments, artificial nucleic acid (RNA) molecules, (pharmaceutical) composition or vaccine or kit is used for treatment or prophylaxis of autoimmune diseases.

[0664] The term “autoimmune disease” refers to any disease, disorder or condition in a subject characterized by cellular, tissue and/or organ injury caused by an immunologic reaction of the subject to its own cells, tissues and/or organs. Typically, “autoimmune diseases” result from, or are aggravated by, the production of antibodies that are reactive with autoantigens, i.e. antigens expressed by healthy body cells.

[0665] Autoimmune diseases can be broadly divided into systemic and organ-specific or localised autoimmune disorders, depending on the principal clinico-pathologic features of each disease. Autoimmune diseases may be divided into the categories of systemic syndromes, including, but not limited to, systemic lupus erythematosus (SLE), Sjögren's syndrome, Scleroderma, Rheumatoid Arthritis and polymyositis or local syndromes which may be endocrinologic (type I diabetes (Diabetes mellitus Type 1), Hashimoto's thyroiditis, Addison's disease etc.), dermatologic (pemphigus vulgaris), haematologic (autoimmune haemolytic anaemia), neural (multiple sclerosis) or can involve virtually any circumscribed mass of body tissue. Autoimmune diseases in the context of the present invention may be selected from the group consisting of type I autoimmune diseases or type II autoimmune diseases or type III autoimmune diseases or type IV autoimmune diseases, such as, for example, multiple sclerosis (MS), rheumatoid arthritis, diabetes, type I diabetes (Diabetes mellitus Type 1), chronic polyarthritis, Basedow's disease, autoimmune forms of chronic hepatitis, colitis ulcerosa, type I allergy diseases, type II allergy diseases, type III allergy diseases, type IV allergy diseases, fibromyalgia, hair loss, Bechterew's disease, Crohn's disease, Myasthenia gravis, neurodermitis, Polymyalgia rheumatica, progressive systemic sclerosis (PSS), Reiter's syndrome, rheumatic arthritis, psoriasis, vasculitis, and type II diabetes.

### Inflammatory Diseases

[0666] In preferred embodiments, artificial nucleic acid (RNA) molecules, (pharmaceutical) composition or vaccine or kit is used for treatment or prophylaxis of inflammatory diseases.

[0667] The term “inflammatory disease” refers to any disease, disorder or condition in a subject characterized by, caused by, resulting from, or accompanied by inflammation, preferably chronic inflammation. Autoimmune disorders may or may not be associated with inflammation. Moreover, inflammation may or may not be caused by an autoimmune disorder. Thus, certain disorders may be characterized as both autoimmune and inflammatory disorders.

[0668] Exemplary inflammatory diseases in the context of the present invention include, without limitation, rheumatoid arthritis, Crohn's disease, diabetic retinopathy, psoriasis, endometriosis, Alzheimer's, ankylosing spondylitis, arthritis (osteoarthritis, rheumatoid arthritis (RA), psoriatic arthritis), asthma, atherosclerosis, colitis, dermatitis, diverticulitis, fibromyalgia, hepatitis, irritable bowel syndrome (IBS), systemic lupus erythematous (SLE), nephritis, Parkinson's disease, and ulcerative colitis.

### Allergies

[0669] In preferred embodiments, artificial nucleic acid (RNA) molecules, (pharmaceutical) composition or vaccine or kit is used for treatment or prophylaxis of allergies.

[0670] The term “allergy” or “allergic hypersensitivity” refers to any disease, disorder or condition caused by or characterized by a hypersensitivity reaction initiated by immunologic mechanisms in response to a substance (allergen), often in a genetically predisposed individual (atopy). Allergy can be antibody- or cell-mediated. In most patients, the antibody typically responsible for an allergic reaction belongs to the IgE isotype (IgE-mediated allergy, type-I allergy). In non IgE-mediated allergy, the antibody may belong to the IgG isotype. Allergies may be classified according to the source of the antigen evoking the hypersensitive reaction. In the context of the present invention, allergies may be selected from (a) food allergy, (b) drug allergy, (c) house dust allergy, (d) insect venom or bite allergy, and (e) pollen allergy. Alternatively, allergies may be classified based on the major symptoms of the hypersensitive reaction. In the context of the present invention, allergies may be selected from the group of (a) asthma, (b) rhinitis, (c) conjunctivitis, (d) rhinoconjuctivitis, (e) dermatitis, (f) urticaria and (g) anaphylaxis.

### Combination Therapy

[0671] The inventive artificial nucleic acid (RNA) molecule, (pharmaceutical) composition or vaccine or kit may also be used in combination therapy. Any other therapy useful for treating or preventing the diseases and disorders defined herein may be combined with the uses and methods disclosed herein.

[0672] For instance, the subject receiving the inventive artificial nucleic acid (RNA) molecule, (pharmaceutical) composition or vaccine or kit may be a patient with cancer, preferably as defined herein, or a related condition, receiving chemotherapy (e.g. first-line or second-line chemotherapy), radiotherapy, chemoradiation (combination of chemotherapy and radiotherapy), tyrosine kinase inhibitors (e.g. EGFR tyrosine kinase inhibitors), antibody therapy and/or inhibitory and/or stimulatory checkpoint molecules (e.g. CTLA4 inhibitors), or a patient, who has achieved partial response or stable disease after having received one or more of the treatments specified above. Or, the subject receiving the inventive artificial nucleic acid (RNA) molecule, (pharmaceutical) composition or vaccine or kit may be a patient with an infectious disease, preferably as defined herein, receiving antibiotic, antifungal or antiviral therapy.

[0673] In a further aspect, the present invention thus also relates to the use of the inventive artificial nucleic acid (RNA) molecule, (pharmaceutical) composition or vaccine or kit-of-parts for supporting another therapy of cancer, an infectious disease, or any other disease amenable by treatment with said artificial nucleic acid molecule, (pharmaceutical) composition or vaccine or kit.

[0674] Administration of the inventive artificial nucleic acid (RNA) molecule, (pharmaceutical) composition or vaccine or kit-of-parts may be accomplished prior to, simultaneously and/or subsequently to administering another therapeutic or subjecting the patient to another therapy that is useful for treatment of the particular disease or condition to be treated.

### In Vitro Methods

[0675] In further aspects, the present invention provides useful in vitro methods that allow to determine and prepare suitable UTR combinations artificial nucleic acid molecules comprising the same, preferably capable of increasing the expression efficiency of an operably linked coding sequence.

[0676] Thus, the present invention provides a method for increasing the expression efficacy of an artificial nucleic acid (RNA) molecule comprising at least one coding region encoding a (poly-)peptide or protein preferably as disclosed herein, said method comprising (a) associating said coding region with a at least one 5′ UTR element derived from a 5′ UTR of a gene selected from the group consisting of HSD17B4, ASAH1, ATP5A1, MP68, NDUFA4, NOSIP, RPL31, SLC7A3, TUBB4B and UBQLN2, or from a corresponding RNA sequence, homolog, a fragment or a variant thereof; (b) associating said coding region with at least one 3′ UTR element derived from a 3′ UTR of a gene selected from the group consisting of PSMB3, CASP1, COX6B1, GNAS, NDUFA1 and RPS9, or from a corresponding RNA sequence, homolog, a fragment or a variant thereof; and (c) obtaining an artificial nucleic acid (RNA) molecule.

[0677] In a further aspect, the present invention provides a method of identifying a combination of 5′ UTR and 3′ UTR capable of increasing the expression efficiency in a desired tissue or a cell derived from the desired tissue, comprising: a) generating a library of artificial nucleic acid molecules (“test constructs”), each comprising a “reporter ORF” encoding a detectable reporter polynucleotide, preferably selected luciferase or eGFP, operably linked to one of the 5′ UTRs and/or one of the 3′ UTRs as defined in claim 3; b) providing an artificial nucleic acid molecule comprising said “reporter ORF” operably linked to reference 5′ and 3′ UTRs, preferably RPL32 and ALB7 as a “reference construct”; c) introducing said test constructs and said reference constructs into the desired tissue or cell under suitable conditions allowing their expression; d) detecting and quantifying the expression of said polypeptide from the “reporter ORF” from the test constructs and the reference construct; e) comparing the polypeptide expression from the test constructs and reference constructs; wherein test constructs characterized by an increased polypeptide expression as compared to the reference construct are identified as being capable of increasing the expression efficiency in the desired tissue or cell.

### DESCRIPTION OF THE FIGURES

[0678] FIG. 1: Mean expression profiles of selected (poly-)peptides and proteins of interest from RNA constructs comprising inventive UTR combinations.

[0679] FIG. 2: Mean expression profiles from RNA constructs comprising inventive UTR combinations operably linked to coding regions encoding different (poly-)peptides or proteins of interest and an A64 poly(A) sequence followed by N5 as 3′ UTR.

[0680] FIG. 3: Mean expression profiles of RNA constructs comprising polyC and histone stem loop in addition to inventive UTR combinations operably linked to coding region encoding different (poly-)peptides or proteins of interest in different cell lines.

[0681] FIG. 4: Mean expression profiles of RNA constructs comprising inventive UTR combinations operably linked to coding region encoding erythropoietin (EPO) in different cell lines.

[0682] FIG. 5: Mean expression profiles of RNA constructs comprising inventive UTR combinations operably linked to coding region encoding different (poly-)peptides or proteins of interest in human diploid fibroblasts (HDF).

[0683] FIG. 6: Mean expression profiles of RNA constructs comprising inventive UTR combinations operably linked to coding region encoding antigen construct of interest protein in different cell lines.

[0684] FIG. 7: Mean expression profiles of RNA constructs comprising inventive UTR combinations operably linked to coding region encoding different (poly-)peptides or proteins of interest in HeLa cells.

[0685] FIG. 8: Mean expression profiles of RNA constructs comprising inventive UTR combinations operably linked to coding region encoding different (poly-)peptides or proteins of interest in HepG2 cells.

[0686] FIG. 9: Mean expression profiles of RNA constructs comprising inventive UTR combinations operably linked to coding region encoding different (poly-)peptides or proteins of interest in HSkMC cells.

[0687] FIG. 10: Mean expression profiles of RNA constructs comprising inventive UTR combinations operably linked to coding region encoding Rabies Virus Glycoprotein (RAVG) in different cell lines.

[0688] FIG. 11: Mean expression profiles of RNA constructs comprising inventive UTR combinations operably linked to coding region encoding different (poly-)peptides or proteins of interest in HEK293T cells.

### EXAMPLES

[0689] In the following, particular examples illustrating various embodiments and aspects of the invention are presented. However, the present invention shall not to be limited in scope by the specific embodiments described herein. The following preparations and examples are given to enable those skilled in the art to more clearly understand and to practice the present invention. The present invention, however, is not limited in scope by the exemplified embodiments, which are intended as illustrations of single aspects of the invention only, and methods which are functionally equivalent are within the scope of the invention. Indeed, various modifications of the invention in addition to those described herein will become readily apparent to those skilled in the art from the foregoing description, accompanying figures and the examples below. All such modifications fall within the scope of the appended claims.

### Example 1: Increase of RAV-G Expression by Using Specific UTR-Combinations

[0690] Cells were seeded on 96 well plates with black rim & clear optical bottom (Nunc Microplate; Thermo Fisher). HeLa cells or HDF were seeded 24 hours before transfection in a compatible complete cell medium (10,000 cells in 200 μl/well). HSkMC were seeded 48 hours before transfection in Differentiation Medium containing 2% horse serum (Gibco) to induce differentiation (48,000 cells in 200 μl/well). Cells were maintained at 37° C., 5% CO₂.

[0691] The day of transfection, the complete medium on HeLa or HDF was replaced with serum-free Opti-MEM medium (Thermo Fisher). Medium on HSkMC was exchanged for fresh complete Differentiation Medium.

[0692] Each RNA was complexed with either Lipofectamine2000 at a ratio of 1/1.5 (w/v) (HeLa & HDF) or Lipofectamine3000 at a ratio of 1/2.5 (w/v) (HSkMC) for 20 minutes in Opti-MEM.

[0693] Lipocomplexed mRNAs were then added to cells for transfection with either 100 ng of RNA (HeLa & HDF) or 70 ng of RNA (HSkMC) per well in a total volume of 200 μl.

[0694] 90 minutes post start of transfection, 150 μl/well of transfection solution on HeLa or HDF was exchanged for 150 μl/well of complete medium. Cells were further maintained at 37° C., 5% CO2 before performing In-cell-Western. 24, 48 or 72 hours post start of transfection, RAV-G expression was quantified by In-Cell-Western using a primary antibody directed against an E-tag (rabbit polyclonal IgG; Bethyl), followed by an IRDye-coupled secondary antibody (IRDye 800CW goat anti-rabbit IgG; LI-COR). All steps of the In-Cell-Western were performed at room temperature.

[0695] First, cells were washed once with PBS and fixed with 3.7% formaldehyde in PBS for 20 minutes. After washing once in PBS, cells were permeabilized with 0.1% Triton X-100 in PBS for 10 minutes. After washing 3 times with 0.1% Tween 20 in PBS, cells were blocked for 30 minutes with Odyssey blocking buffer (PBS) (LI-COR).

[0696] Next, cells were incubated for 90 minutes with primary antibody (diluted 1:1000 in Odyssey blocking buffer (PBS)). Cells were then washed 3 times (Tween/PBS).

[0697] Subsequently, cells were incubated with a mixture of secondary antibody and Cell-Tag 700 Stain (LI-COR) (diluted 1:200 and 1:1000, respectively, in Odyssey blocking buffer (PBS)) for one hour in the dark.

[0698] After washing 4 times (Tween/PBS), PBS was added to cells and plates scanned using an Odyssey® CLx Imaging system (LI-COR).

[0699] Fluorescence (800 nm) was quantified using Image Studio Lite Software and the results compared to expression from a reference construct containing the RPL32/ALB7-UTR-combination set to 100%. The sequences of RPL32-derived 5′-UTRs are shown in SEQ ID NO: 21 (DNA) and 22 (RNA). The sequences of ALB7-derived 3′-UTRs are shown in SEQ ID NO: 35 (DNA) and 36 (RNA).

[0700] Mean expression profiles of RNA constructs comprising inventive UTR combinations operably linked to coding region encoding Rabies Virus Glycoprotein (RAVG) in different cell lines are shown in FIG. 10.

[0701] As apparent, it was possible to significantly increase expression by using the inventive UTR combinations operably linked to the coding region.

[0702] Further detailed results regarding the use of different mRNA 3′ sequences, i.e. A64N5 (i.e. a poly(A) sequence with 64A followed by N5) and C30-HSL as a 3′ sequence (i.e. a poly(C) sequence having 30C followed by a Histone stem-loop; histone SL or HSL as described above) are shown in Table 4A-I herein below. The left side of Table 4A-I shows results for A64N5, the right side shows results for C30-HSL. FIG. 10 as described above is the average value of both experiments. As in all examples, the UTR-combination RPL32/ALB7.1 was normalized to 100%.

TABLE 4A-I
detailed results for RAV-G carrying
A64N5 or C30-HSL 3′-end sequences

| | |
|---|---|
| % | UTRs |

target: RAV-G, A64N5

| | |
|---|---|
| 100 | RPL32/ALB7.1 |
| 149 | Rpl31.1/CASP1.1 |
| 153 | Ndufa4.1/CASP1.1 |
| 158 | ATP5A1/CASP1.1 |
| 160 | Slc7a3.1/COX6B1.1 |
| 161 | Slc7a3.1/CASP1.1 |
| 173 | Rpl31.1/Ndufa1.1 |
| 177 | Mp68/RPS9.1 |
| 181 | Nosip.1/CASP1.1 |
| 182 | ATP5A1/Gnas.1 |
| 183 | Rpl31.1/COX6B1.1 |
| 184 | Slc7a3.1/Gnas.1 |
| 184 | Rpl31.1/PSMB3.1 |
| 185 | TUBB4B.1/RPS9.1 |
| 187 | Nosip.1/Ndufa1.1 |
| 187 | HSD17B4/CASP1.1 |
| 188 | Slc7a3.1/Ndufa1.1 |
| 190 | Mp68/Ndufa1.1 |
| 190 | HSD17B4/Gnas.1 |
| 192 | Nosip.1/RPS9.1 |
| 192 | HSD17B4/COX6B1.1 |
| 194 | Slc7a3.1/RPS9.1 |
| 195 | Rpl31.1/Gnas.1 |
| 196 | HSD17B4/RPS9.1 |
| 196 | ATP5A1/COX6B1.1 |
| 197 | Mp68/COX6B1.1 |
| 199 | Ndufa4.1/COX6B1.1 |
| 200 | Ndufa4.1/Gnas.1 |
| 202 | ATP5A1/RPS9.1 |
| 203 | Rpl31.1/RPS9.1 |
| 203 | ATP5A1/Ndufa1.1 |
| 206 | HSD17B4/PSMB3.1 |
| 206 | ATP5A1/PSMB3.1 |
| 206 | Ndufa4.1/RPS9.1 |
| 209 | HSD17B4/Ndufa1.1 |
| 216 | Ndufa4.1/PSMB3.1 |
| 219 | Slc7a3.1/PSMB3.1 |
| 220 | Nosip.1/COX6B1.1 |
| 223 | Mp68/PSMB3.1 |
| 224 | Ndufa4.1/Ndufa1.1 |
| 226 | ASAH1/RPS9.1 |
| 229 | Nosip.1/PSMB3.1 |

target: RAV-G, C30-HSL

| | |
|---|---|
| 100 | RPL32/ALB7.1 |
| 116 | ATP5A1/Gnas.1 |
| 119 | HSD17B4/Gnas.1 |
| 123 | Slc7a3.1/RPS9.1 |
| 125 | Rpl31.1/Gnas.1 |
| 126 | Ndufa4.1/Gnas.1 |
| 128 | Mp68/RPS9.1 |
| 133 | Nosip.1/CASP1.1 |
| 135 | Rpl31.1/COX6B1.1 |
| 136 | Slc7a3.1/Gnas.1 |
| 136 | Mp68/Ndufa1.1 |
| 137 | TUBB4B.1/RPS9.1 |
| 138 | Nosip.1/PSMB3.1 |
| 146 | Mp68/PSMB3.1 |
| 149 | Nosip.1/Ndufa1.1 |
| 149 | ATP5A1/PSMB3.1 |
| 150 | Slc7a3.1/Ndufa1.1 |
| 155 | Rpl31.1/CASP1.1 |
| 155 | Ndufa4.1/PSMB3.1 |
| 157 | ATP5A1/Ndufa1.1 |
| 159 | HSD17B4/PSMB3.1 |
| 159 | Ndufa4.1/CASP1.1 |
| 160 | Nosip.1/COX6B1.1 |
| 164 | Ndufa4.1/Ndufa1.1 |
| 165 | Slc7a3.1/CASP1.1 |
| 167 | HSD17B4/RPS9.1 |
| 167 | Rpl31.1/PSMB3.1 |
| 168 | Rpl31.1/Ndufa1.1 |
| 169 | Slc7a3.1/COX6B1.1 |
| 174 | HSD17B4/Ndufa1.1 |
| 177 | HSD17B4/COX6B1.1 |
| 179 | Slc7a3.1/PSMB3.1 |
| 180 | ATP5A1/RPS9.1 |
| 181 | ATP5A1/COX6B1.1 |
| 183 | Mp68/COX6B1.1 |
| 195 | ASAH1/RPS9.1 |
| 195 | Nosip.1/RPS9.1 |
| 197 | ATP5A1/CASP1.1 |
| 202 | Rpl31.1/RPS9.1 |
| 207 | HSD17B4/CASP1.1 |
| 208 | Ndufa4.1/COX6B1.1 |

[0703] The sequences which were used in this example are shown in Table 4A-II.

TABLE 4A-II
sequences used in example 1

| SEQ | sequence | |
|---|---|---|
| ID NO | type | UTR-combination and ORF |
| 42 | protein | protein sequence (wt) from RAV_M13215.1_glycoprotein_RAV-G |
| 46 | RNA | CDS sequence (wt) from RAV_M13215.1_glycoprotein_RAV-G |
| 50 | RNA | CDS sequence (GC) from RAV_M13215.1_glycoprotein_RAV-G(GC) |
| 54 | RNA | HSD17B4_RAV-G(GC)_PSMB3_A64-C30-histoneSL |
| 55 | RNA | HSD17B4_RAV-G(GC)_PSMB3_A64 |
| 61 | RNA | HSD17B4_RAV-G(GC)_CASP1_A64-C30-histoneSL |
| 62 | RNA | HSD17B4_RAV-G(GC)_CASP1_A64 |
| 68 | RNA | HSD17B4_RAV-G(GC)_COX6B1_A64-C30-histoneSL |
| 69 | RNA | HSD17B4_RAV-G(GC)_COX6B1_A64 |
| 75 | RNA | HSD17B4_RAV-G(GC)_Gnas_A64-C30-histoneSL |
| 76 | RNA | HSD17B4_RAV-G(GC)_Gnas_A64 |
| 82 | RNA | HSD17B4_RAV-G(GC)_Ndufa1_A64-C30-histoneSL |
| 83 | RNA | HSD17B4_RAV-G(GC)_Ndufa1_A64 |
| 89 | RNA | HSD17B4_RAV-G(GC)_RPS9_A64-C30-histoneSL |
| 90 | RNA | HSD17B4_RAV-G(GC)_RPS9_A64 |
| 96 | RNA | ASAH1_RAV-G(GC)_RPS9_A64-C30-histoneSL |
| 97 | RNA | ASAH1_RAV-G(GC)_RPS9_A64 |
| 103 | RNA | ATP5A1_RAV-G(GC)_PSMB3_A64-C30-histoneSL |
| 104 | RNA | ATP5A1_RAV-G(GC)_PSMB3_A64 |
| 110 | RNA | ATP5A1_RAV-G(GC)_CASP1_A64-C30-histoneSL |
| 111 | RNA | ATP5A1_RAV-G(GC)_CASP1_A64 |
| 117 | RNA | ATP5A1_RAV-G(GC)_COX6B1_A64-C30-histoneSL |
| 118 | RNA | ATP5A1_RAV-G(GC)_COX6B1_A64 |
| 124 | RNA | ATP5A1_RAV-G(GC)_Gnas_A64-C30-histoneSL |
| 125 | RNA | ATP5A1_RAV-G(GC)_Gnas_A64 |
| 131 | RNA | ATP5A1_RAV-G(GC)_Ndufa1_A64-C30-histoneSL |
| 132 | RNA | ATP5A1_RAV-G(GC)_Ndufa1_A64 |
| 138 | RNA | ATP5A1_RAV-G(GC)_RPS9_A64-C30-histoneSL |
| 139 | RNA | ATP5A1_RAV-G(GC)_RPS9_A64 |
| 145 | RNA | Mp68_RAV-G(GC)_PSMB3_A64-C30-histoneSL |
| 146 | RNA | Mp68_RAV-G(GC)_PSMB3_A64 |
| 152 | RNA | Mp68_RAV-G(GC)_CASP1_A64-C30-histoneSL |
| 153 | RNA | Mp68_RAV-G(GC)_CASP1_A64 |
| 159 | RNA | Mp68_RAV-G(GC)_COX6B1_A64-C30-histoneSL |
| 160 | RNA | Mp68_RAV-G(GC)_COX6B1_A64 |
| 166 | RNA | Mp68_RAV-G(GC)_Gnas_A64-C30-histoneSL |
| 167 | RNA | Mp68_RAV-G(GC)_Gnas_A64 |
| 173 | RNA | Mp68_RAV-G(GC)_Ndufa1_A64-C30-histoneSL |
| 174 | RNA | Mp68_RAV-G(GC)_Ndufa1_A64 |
| 180 | RNA | Mp68_RAV-G(GC)_RPS9_A64-C30-histoneSL |
| 181 | RNA | Mp68_RAV-G(GC)_RPS9_A64 |
| 187 | RNA | Ndufa4_RAV-G(GC)_PSMB3_A64-C30-histoneSL |
| 188 | RNA | Ndufa4_RAV-G(GC)_PSMB3_A64 |
| 194 | RNA | Ndufa4_RAV-G(GC)_CASP1_A64-C30-histoneSL |
| 195 | RNA | Ndufa4_RAV-G(GC)_CASP1_A64 |
| 201 | RNA | Ndufa4_RAV-G(GC)_COX6B1_A64-C30-histoneSL |
| 202 | RNA | Ndufa4_RAV-G(GC)_COX6B1_A64 |
| 208 | RNA | Ndufa4_RAV-G(GC)_Gnas_A64-C30-histoneSL |
| 209 | RNA | Ndufa4_RAV-G(GC)_Gnas_A64 |
| 215 | RNA | Ndufa4_RAV-G(GC)_Ndufa1_A64-C30-histoneSL |
| 216 | RNA | Ndufa4_RAV-G(GC)_Ndufa1_A64 |
| 222 | RNA | Ndufa4_RAV-G(GC)_RPS9_A64-C30-histoneSL |
| 223 | RNA | Ndufa4_RAV-G(GC)_RPS9_A64 |
| 229 | RNA | Nosip_RAV-G(GC)_PSMB3_A64-C30-histoneSL |
| 230 | RNA | Nosip_RAV-G(GC)_PSMB3_A64 |
| 236 | RNA | Nosip_RAV-G(GC)_CASP1_A64-C30-histoneSL |
| 237 | RNA | Nosip_RAV-G(GC)_CASP1_A64 |
| 243 | RNA | Nosip_RAV-G(GC)_COX6B1_A64-C30-histoneSL |
| 244 | RNA | Nosip_RAV-G(GC)_COX6B1_A64 |
| 250 | RNA | Nosip_RAV-G(GC)_Gnas_A64-C30-histoneSL |

### Example 2: Increase of HsEpo and Ppluc Expression by Using Specific UTR-Combinations

[0704] Cells were seeded on 96 well plates. HDF and HepG2 (10,000 cells in 200 μl/well) were seeded 24 hours before transfection in a compatible complete cell medium. HSkMC (48,000 cells in 200 μl/well) were seeded 48 hours before transfection in Differentiation Medium containing 2% horse serum (Gibco) to induce differentiation. Cells were maintained at 37° C., 5% CO₂.

[0705] The day of transfection, the complete medium (HDF and HepG2) was replaced with serum-free Opti-MEM medium (Thermo Fisher). Medium on HSkMC was exchanged for fresh complete Differentiation Medium.

[0706] Each RNA was complexed with either Lipofectamine2000 at a ratio of 1/1.5 (w/v) (HDF and HepG2) or Lipofectamine3000 at a ratio of 1/2.5 (w/v) (HSkMC) for 20 minutes in Opti-MEM.

[0707] Lipocomplexed mRNAs were then added to cells for transfection with 100 ng per well in a total volume of 200 μl.

[0708] 90 minutes post start of transfection, 150 μl/well of transfection solution on HDF and HepG2 was exchanged for 150 μl/well of complete medium. Cells were further maintained at 37° C., 5% CO2 before performing In-cell-Western.

### HsEPO:

[0709] 24 hours post start of transfection, HsEpo expression was measured in cell supernatants using a commercially available ELISA kit (RNDsystems, Cat. DEP00) and a Hidex Chameleon plate reader.

### PPluc:

[0710] 24 hours post start of transfection, Ppluc expression was measured in cell lysates. Cells were lysed by adding 100 μl of 1× passive lysis buffer (Promega, Cat. E1941) for at least 15 minutes. Lysed cells were incubated at −80° C. for at least 1 hour. Lysed cells were thawed and 20 μl were added to white LIA assay plates (Greiner Cat. 655075). Plates were introduced into a Hidex Chameleon plate reader with injection device for Beetle-juice containing substrate for firefly luciferase. Per well, 100 μl of beetle-juice were added. Ppluc luminescence was measured by Hidex Chameleon plate reader.

[0711] Results were compared to expression from a reference construct containing the RPL32/ALB7-UTR-combination set to 100%. The sequences of RPL32-derived 5′-UTRs are shown in SEQ ID NO: 21 (DNA) and 22 (RNA). The sequences of ALB7-derived 3′-UTRs are shown in SEQ ID NO: 35 (DNA) and 36 (RNA).

[0712] Mean expression profiles of RNA constructs comprising inventive UTR combinations operably linked to coding region encoding EPO in different cell lines are shown in FIG. 4.

[0713] As apparent, it was possible to significantly increase expression by using the inventive UTR combinations operably linked to the coding region.

[0714] Further detailed results for EPO regarding the use of different mRNA 3′ sequences, i.e. A64N5 (i.e. a poly(A) sequence with 64A followed by N5) and C30-HSL as a 3′ sequence (i.e. a poly(C) sequence having 30C followed by a Histone stem-loop; histone SL or HSL as described above) are shown in Table 4B-I herein below. The left side of Table 4B-I shows results for A64N5, the right side shows results for C30-HSL. FIG. 4 as described above is the average value of both experiments. As in all examples, the UTR-combination RPL32/ALB7.1 was normalized to 100%.

TABLE 4B-I
detailed results for EPO carrying
A64N5 or C30-HSL 3′-end sequences

| | |
|---|---|
| % | UTRs |

target: EPO; A64N5

| | |
|---|---|
| 100 | RPL32/ALB7.1 |
| 414 | HSD17B4/CASP1.1 |
| 440 | ATP5A1/CASP1.1 |
| 494 | HSD17B4/COX6B1.1 |
| 574 | Ndufa4.1/CASP1.1 |
| 575 | ATP5A1/Gnas.1 |
| 637 | Mp68/COX6B1.1 |
| 645 | Ndufa4.1/Gnas.1 |
| 711 | ATP5A1/RPS9.1 |
| 718 | Ndufa4.1/RPS9.1 |
| 720 | Rpl31.1/COX6B1.1 |
| 736 | ASAH1/RPS9.1 |
| 759 | Ndufa4.1/COX6B1.1 |
| 766 | Ndufa4.1/Ndufa1.l |
| 800 | Rpl31.1/CASP1.1 |
| 822 | ATP5A1/COX6B1.1 |
| 840 | Mp68/Ndufa1.1 |
| 852 | ATP5A1/Ndufa1.1 |
| 858 | Nosip.1/PSMB3.1 |
| 898 | Rpl31.1/Gnas.1 |
| 902 | Nosip.1/COX6B1.1 |
| 911 | Mp68/PSMB3.1 |
| 931 | Rpl31.1/PSMB3.1 |
| 945 | ATP5A1/PSMB3.1 |
| 965 | HSD17B4/Gnas.1 |
| 984 | Nosip.1/RPS9.1 |
| 987 | Rpl31.1/Ndufa1.1 |
| 997 | Nosip.1/CASP1.1 |
| 1003 | TUBB4B.1/RPS9.1 |
| 1014 | Slc7a3.1/RPS9.1 |
| 1064 | Slc7a3.1/Gnas.1 |
| 1078 | Rpl31.1/RPS9.1 |
| 1088 | Mp68/RPS9.1 |
| 1102 | Nosip.1/Ndufa1.1 |
| 1247 | HSD17B4/RPS9.1 |
| 1250 | Slc7a3.1/Ndufa1.1 |
| 1259 | Ndufa4.1/PSMB3.1 |
| 1278 | Slc7a3.1/PSMB3.1 |
| 1304 | HSD17B4/Ndufa1.1 |
| 1319 | Slc7a3.1/CASP1.1 |
| 1334 | Slc7a3.1/COX6B1.1 |
| 1507 | HSD17B4/PSMB3.1 |

target: EPO; C30-HSL

| | |
|---|---|
| 100 | RPL32/ALB7.1 |
| 358 | Ndufa4.1/Gnas.1 |
| 438 | HSD17B4/Gnas.1 |
| 471 | Rpl31.1/PSMB3.1 |
| 494 | ATP5A1/Ndufa1.1 |
| 628 | ATP5A1/Gnas.1 |
| 630 | Slc7a3.1/Ndufa1.1 |
| 740 | Slc7a3.1/Gnas.1 |
| 857 | HSD17B4/Ndufa1.1 |
| 905 | Rpl31.1/CASP1.1 |
| 955 | Rpl31.1/Gnas.1 |
| 979 | ATP5A1/PSMB3.1 |
| 987 | Slc7a3.1/PSMB3.1 |
| 998 | Mp68/COX6B1.1 |
| 999 | ATP5A1/CASP1.1 |
| 1024 | Slc7a3.1/CASP1.1 |
| 1035 | Nosip.1/CASP1.1 |
| 1055 | Ndufa4.1/Ndufa1.1 |
| 1099 | Nosip.1/Ndufa1.1 |
| 1164 | Slc7a3.1/RPS9.1 |
| 1182 | ASAH1/RPS9.1 |
| 1192 | Nosip.1/PSMB3.1 |
| 1195 | Rpl31.1/Ndufa1.1 |
| 1195 | Ndufa4.1/COX6B1.1 |
| 1239 | HSD17B4/COX6B1.1 |
| 1274 | Mp68/Ndufa1.1 |
| 1358 | ATP5A1/COX6B1.1 |
| 1359 | TUBB4B.1/RPS9.1 |
| 1423 | Ndufa4.1/RPS9.1 |
| 1467 | HSD17B4/CASP1.1 |
| 1479 | Slc7a3.1/COX6B1.1 |
| 1506 | Ndufa4.1/CASP1.1 |
| 1542 | Nosip.1/COX6B1.1 |
| 1618 | Nosip.1/RPS9.1 |
| 1726 | Rpl31.1/COX6B1.1 |
| 1757 | HSD17B4/PSMB3.1 |
| 1773 | Mp68/RPS9.1 |
| 1868 | ATP5A1/RPS9.1 |
| 1924 | Ndufa4.1/PSMB3.1 |
| 1992 | Mp68/PSMB3.1 |
| 2051 | Rpl31.1/RPS9.1 |

[0715] The sequences which were used in this example are shown in Table 4B-II.

TABLE 4B-II
sequences used in example 2

| SEQ | sequence | |
|---|---|---|
| ID NO | type | UTR-combination and ORF |
| 43 | protein | protein sequence (wt) from Homo sapiens_NM_000799.2_erythropoietin_HsEPO |
| 47 | RNA | CDS sequence (wt) from Homo sapiens_NM000799.2_erythropoietin_HsEPO |
| 51 | RNA | CDS sequence (GC)from Homo sapiens_NM000799.2_erythropoietin_HsEPO(GC) |
| 56 | RNA | HSD17B4_HsEPO(GC)_PSMB3_A64-C30-histoneSL |
| 57 | RNA | HSD17B4_HsEPO(GC)_PSMB3_A64 |
| 63 | RNA | HSD17B4_HsEPO(GC)_CASP1_A64-C30-histoneSL |
| 64 | RNA | HSD17B4_HsEPO(GC)_CASP1_A64 |
| 70 | RNA | HSD17B4_HsEPO(GC)_COX6B1_A64-C30-histoneSL |
| 71 | RNA | HSD17B4_HsEPO(GC)_COX6B1_A64 |
| 77 | RNA | HSD17B4_HsEPO(GC)_Gnas_A64-C30-histoneSL |
| 78 | RNA | HSD17B4_HsEPO(GC)_Gnas_A64 |
| 84 | RNA | HSD17B4_HsEPO(GC)_Ndufa1_A64-C30-histoneSL |
| 85 | RNA | HSD17B4_HsEPO(GC)_Ndufa1_A64 |
| 91 | RNA | HSD17B4_HsEPO(GC)_RPS9_A64-C30-histoneSL |
| 92 | RNA | HSD17B4_HsEPO(GC)_RPS9_A64 |
| 98 | RNA | ASAH1_HsEPO(GC)_RPS9_A64-C30-histoneSL |
| 99 | RNA | ASAH1_HsEPO(GC)_RPS9_A64 |
| 105 | RNA | ATP5A1_HsEPO(GC)_PSMB3_A64-C30-histoneSL |
| 106 | RNA | ATP5A1_HsEPO(GC)_PSMB3_A64 |
| 112 | RNA | ATP5A1_HsEPO(GC)_CASP1_A64-C30-histoneSL |
| 113 | RNA | ATP5A1_HsEPO(GC)_CASP1_A64 |
| 119 | RNA | ATP5A1_HsEPO(GC)_COX6B1_A64-C30-histoneSL |
| 120 | RNA | ATP5A1_HsEPO(GC)_COX6B1_A64 |
| 126 | RNA | ATP5A1_HsEPO(GC)_Gnas_A64-C30-histoneSL |
| 127 | RNA | ATP5A1_HsEPO(GC)_Gnas_A64 |
| 133 | RNA | ATP5A1_HsEPO(GC)_Ndufa1_A64-C30-histoneSL |
| 134 | RNA | ATP5A1_HsEPO(GC)_Ndufa1_A64 |
| 140 | RNA | ATP5A1_HsEPO(GC)_RPS9_A64-C30-histoneSL |
| 141 | RNA | ATP5A1_HsEPO(GC)_RPS9_A64 |
| 147 | RNA | Mp68_HsEPO(GC)_PSMB3_A64-C30-histoneSL |
| 148 | RNA | Mp68_HsEPO(GC)_PSMB3_A64 |
| 154 | RNA | Mp68_HsEPO(GC)_CASP1_A64-C30-histoneSL |
| 155 | RNA | Mp68_HsEPO(GC)_CASP1_A64 |
| 161 | RNA | Mp68_HsEPO(GC)_COX6B1_A64-C30-histoneSL |
| 162 | RNA | Mp68_HsEPO(GC)_COX6B1_A64 |
| 168 | RNA | Mp68_HsEPO(GC)_Gnas_A64-C30-histoneSL |
| 169 | RNA | Mp68_HsEPO(GC)_Gnas_A64 |
| 175 | RNA | Mp68_HsEPO(GC)_Ndufa1_A64-C30-histoneSL |
| 176 | RNA | Mp68_HsEPO(GC)_Ndufa1_A64 |
| 182 | RNA | Mp68_HsEPO(GC)_RPS9_A64-C30-histoneSL |
| 183 | RNA | Mp68_HsEPO(GC)_RPS9_A64 |
| 189 | RNA | Ndufa4_HsEPO(GC)_PSMB3_A64-C30-histoneSL |
| 190 | RNA | Ndufa4_HsEPO(GC)_PSMB3_A64 |
| 196 | RNA | Ndufa4_HsEPO(GC)_CASP1_A64-C30-histoneSL |
| 197 | RNA | Ndufa4_HsEPO(GC)_CASP1_A64 |
| 203 | RNA | Ndufa4_HsEPO(GC)_COX6B1_A64-C30-histoneSL |
| 204 | RNA | Ndufa4_HsEPO(GC)_COX6B1_A64 |
| 210 | RNA | Ndufa4_HsEPO(GC)_Gnas_A64-C30-histoneSL |
| 211 | RNA | Ndufa4_HsEPO(GC)_Gnas_A64 |
| 217 | RNA | Ndufa4_HsEPO(GC)_Ndufa1_A64-C30-histoneSL |
| 218 | RNA | Ndufa4_HsEPO(GC)_Ndufa1_A64 |
| 224 | RNA | Ndufa4_HsEPO(GC)_RPS9_A64-C30-histoneSL |
| 225 | RNA | Ndufa4_HsEPO(GC)_RPS9_A64 |
| 231 | RNA | Nosip_HsEPO(GC)_PSMB3_A64-C30-histoneSL |
| 232 | RNA | Nosip_HsEPO(GC)_PSMB3_A64 |
| 238 | RNA | Nosip_HsEPO(GC)_CASP1_A64-C30-histoneSL |
| 239 | RNA | Nosip_HsEPO(GC)_CASP1_A64 |
| 245 | RNA | Nosip_HsEPO(GC)_COX6B1_A64-C30-histoneSL |
| 246 | RNA | Nosip_HsEPO(GC)_COX6B1_A64 |
| 252 | RNA | Nosip_HsEPO(GC)_Gnas_A64-C30-histoneSL |
| 253 | RNA | Nosip_HsEPO(GC)_Gnas_A64 |
| 259 | RNA | Nosip_HsEPO(GC)_Ndufa1_A64-C30-histoneSL |
| 260 | RNA | Nosip_HsEPO(GC)_Ndufa1_A64 |
| 266 | RNA | Nosip_HsEPO(GC)_RPS9_A64-C30-histoneSL |
| 267 | RNA | Nosip_HsEPO(GC)_RPS9_A64 |
| 273 | RNA | Rpl31_HsEPO(GC)_PSMB3_A64-C30-histoneSL |
| 274 | RNA | Rpl31_HsEPO(GC)_PSMB3_A64 |
| 280 | RNA | Rpl31_HsEPO(GC)_CASP1_A64-C30-histoneSL |
| 281 | RNA | Rpl31_HsEPO(GC)_CASP1_A64 |
| 287 | RNA | Rpl31_HsEPO(GC)_COX6B1_A64-C30-histoneSL |
| 288 | RNA | Rpl31_HsEPO(GC)_COX6B1_A64 |
| 294 | RNA | Rpl31_HsEPO(GC)_Gnas_A64-C30-histoneSL |
| 295 | RNA | Rpl31_HsEPO(GC)_Gnas_A64 |
| 301 | RNA | Rpl31_HsEPO(GC)_Ndufa1_A64-C30-histoneSL |
| 302 | RNA | Rpl31_HsEPO(GC)_Ndufa1_A64 |
| 308 | RNA | Rpl31_HsEPO(GC)_RPS9_A64-C30-histoneSL |
| 309 | RNA | Rpl31_HsEPO(GC)_RPS9_A64 |
| 315 | RNA | Slc7a3_HsEPO(GC)_PSMB3_A64-C30-histoneSL |
| 316 | RNA | Slc7a3_HsEPO(GC)_PSMB3_A64 |
| 322 | RNA | Slc7a3_HsEPO(GC)_CASP1_A64-C30-histoneSL |
| 323 | RNA | Slc7a3_HsEPO(GC)_CASP1_A64 |
| 329 | RNA | Slc7a3_HsEPO(GC)_COX6B1_A64-C30-histoneSL |
| 330 | RNA | Slc7a3_HsEPO(GC)_COX6B1_A64 |
| 336 | RNA | Slc7a3_HsEPO(GC)_Gnas_A64-C30-histoneSL |
| 337 | RNA | Slc7a3_HsEPO(GC)_Gnas_A64 |
| 343 | RNA | Slc7a3_HsEPO(GC)_Ndufa1_A64-C30-histoneSL |
| 344 | RNA | Slc7a3_HsEPO(GC)_Ndufa1_A64 |
| 350 | RNA | Slc7a3_HsEPO(GC)_RPS9_A64-C30-histoneSL |
| 351 | RNA | Slc7a3_HsEPO(GC)_RPS9_A64 |
| 357 | RNA | TUBB4B_HsEPO(GC)_RPS9_A64-C30-histoneSL |
| 358 | RNA | TUBB4B_HsEPO(GC)_RPS9_A64 |
| 364 | RNA | Ubqln2_HsEPO(GC)_RPS9_A64-C30-histoneSL |
| 365 | RNA | Ubqln2_HsEPO(GC)_RPS9_A64 |
| 373 | RNA | RPL32_HsEPO(GC)_ALB7_A64-C30-histoneSL |
| 374 | RNA | RPL32_HsEPO(GC)_ALB7_A64 |
| 44 | protein | protein sequence (wt) from Photinus pyralis_U47122.2_luciferase_PpLuc |
| 48 | RNA | CDS sequence (wt) from Photinus pyralis_U47122.2_luciferase_PpLuc |
| 52 | RNA | CDS sequence (GC)from Photinus pyralis_U47122.2_luciferase_PpLuc(GC) |
| 58 | RNA | HSD17B4_PpLuc(GC)_PSMB3_A64-C30-histoneSL |
| 59 | RNA | HSD17B4_PpLuc(GC)_PSMB3_A64 |
| 65 | RNA | HSD17B4_PpLuc(GC)_CASP1_A64-C30-histoneSL |
| 66 | RNA | HSD17B4_PpLuc(GC)_CASP1_A64 |
| 72 | RNA | HSD17B4_PpLuc(GC)_COX6B1_A64-C30-histoneSL |
| 73 | RNA | HSD17B4_PpLuc(GC)_COX6B1_A64 |
| 79 | RNA | HSD17B4_PpLuc(GC)_Gnas_A64-C30-histoneSL |
| 80 | RNA | HSD17B4_PpLuc(GC)_Gnas_A64 |
| 86 | RNA | HSD17B4_PpLuc(GC)_Ndufa1_A64-C30-histoneSL |
| 87 | RNA | HSD17B4_PpLuc(GC)_Ndufa1_A64 |
| 93 | RNA | HSD17B4_PpLuc(GC)_RPS9_A64-C30-histoneSL |
| 94 | RNA | HSD17B4_PpLuc(GC)_RPS9_A64 |
| 100 | RNA | ASAH1_PpLuc(GC)_RPS9_A64-C30-histoneSL |
| 101 | RNA | ASAH1_PpLuc(GC)_RPS9_A64 |
| 107 | RNA | ATP5A1_PpLuc(GC)_PSMB3_A64-C30-histoneSL |
| 108 | RNA | ATP5A1_PpLuc(GC)_PSMB3_A64 |
| 114 | RNA | ATP5A1_PpLuc(GC)_CASP1_A64-C30-histoneSL |
| 115 | RNA | ATP5A1_PpLuc(GC)_CASP1_A64 |
| 121 | RNA | ATP5A1_PpLuc(GC)_COX6B1_A64-C30-histoneSL |
| 122 | RNA | ATP5A1_PpLuc(GC)_COX6B1_A64 |
| 128 | RNA | ATP5A1_PpLuc(GC)_Gnas_A64-C30-histoneSL |
| 129 | RNA | ATP5A1_PpLuc(GC)_Gnas_A64 |
| 135 | RNA | ATP5A1_PpLuc(GC)_Ndufa1_A64-C30-histoneSL |
| 136 | RNA | ATP5A1_PpLuc(GC)_Ndufa1_A64 |
| 142 | RNA | ATP5A1_PpLuc(GC)_RPS9_A64-C30-histoneSL |
| 143 | RNA | ATP5A1_PpLuc(GC)_RPS9_A64 |
| 149 | RNA | Mp68_PpLuc(GC)_PSMB3_A64-C30-histoneSL |
| 150 | RNA | Mp68_PpLuc(GC)_PSMB3_A64 |
| 156 | RNA | Mp68_PpLuc(GC)_CASP1_A64-C30-histoneSL |
| 157 | RNA | Mp68_PpLuc(GC)_CASP1_A64 |
| 163 | RNA | Mp68_PpLuc(GC)_COX6B1_A64-C30-histoneSL |
| 164 | RNA | Mp68_PpLuc(GC)_COX6B1_A64 |
| 170 | RNA | Mp68_PpLuc(GC)_Gnas_A64-C30-histoneSL |
| 171 | RNA | Mp68_PpLuc(GC)_Gnas_A64 |
| 177 | RNA | Mp68_PpLuc(GC)_Ndufa1_A64-C30-histoneSL |
| 178 | RNA | Mp68_PpLuc(GC)_Ndufa1_A64 |
| 184 | RNA | Mp68_PpLuc(GC)_RPS9_A64-C30-histoneSL |
| 185 | RNA | Mp68_PpLuc(GC)_RPS9_A64 |
| 191 | RNA | Ndufa4_PpLuc(GC)_PSMB3_A64-C30-histoneSL |
| 192 | RNA | Ndufa4_PpLuc(GC)_PSMB3_A64 |
| 198 | RNA | Ndufa4_PpLuc(GC)_CASP1_A64-C30-histoneSL |
| 199 | RNA | Ndufa4_PpLuc(GC)_CASP1_A64 |
| 205 | RNA | Ndufa4_PpLuc(GC)_COX6B1_A64-C30-histoneSL |
| 206 | RNA | Ndufa4_PpLuc(GC)_COX6B1_A64 |
| 212 | RNA | Ndufa4_PpLuc(GC)_Gnas_A64-C30-histoneSL |
| 213 | RNA | Ndufa4_PpLuc(GC)_Gnas_A64 |
| 219 | RNA | Ndufa4_PpLuc(GC)_Ndufa1_A64-C30-histoneSL |
| 220 | RNA | Ndufa4_PpLuc(GC)_Ndufa1_A64 |
| 226 | RNA | Ndufa4_PpLuc(GC)_RPS9_A64-C30-histoneSL |
| 227 | RNA | Ndufa4_PpLuc(GC)_RPS9_A64 |
| 233 | RNA | Nosip_PpLuc(GC)_PSMB3_A64-C30-histoneSL |
| 234 | RNA | Nosip_PpLuc(GC)_PSMB3_A64 |
| 240 | RNA | Nosip_PpLuc(GC)_CASP1_A64-C30-histoneSL |
| 241 | RNA | Nosip_PpLuc(GC)_CASP1_A64 |
| 247 | RNA | Nosip_PpLuc(GC)_COX6B1_A64-C30-histoneSL |
| 248 | RNA | Nosip_PpLuc(GC)_COX6B1_A64 |
| 254 | RNA | Nosip_PpLuc(GC)_Gnas_A64-C30-histoneSL |
| 255 | RNA | Nosip_PpLuc(GC)_Gnas_A64 |
| 261 | RNA | Nosip_PpLuc(GC)_Ndufa1_A64-C30-histoneSL |
| 262 | RNA | Nosip_PpLuc(GC)_Ndufa1_A64 |
| 268 | RNA | Nosip_PpLuc(GC)_RPS9_A64-C30-histoneSL |
| 269 | RNA | Nosip_PpLuc(GC)_RPS9_A64 |
| 275 | RNA | Rpl31_PpLuc(GC)_PSMB3_A64-C30-histoneSL |
| 276 | RNA | Rpl31_PpLuc(GC)_PSMB3_A64 |
| 282 | RNA | Rpl31_PpLuc(GC)_CASP1_A64-C30-histoneSL |
| 283 | RNA | Rpl31_PpLuc(GC)_CASP1_A64 |
| 289 | RNA | Rpl31_PpLuc(GC)_COX6B1_A64-C30-histoneSL |
| 290 | RNA | Rpl31_PpLuc(GC)_COX6B1_A64 |
| 296 | RNA | Rpl31_PpLuc(GC)_Gnas_A64-C30-histoneSL |
| 297 | RNA | Rpl31_PpLuc(GC)_Gnas_A64 |
| 303 | RNA | Rpl31_PpLuc(GC)_Ndufa1_A64-C30-histoneSL |
| 304 | RNA | Rpl31_PpLuc(GC)_Ndufa1_A64 |
| 310 | RNA | Rpl31_PpLuc(GC)_RPS9_A64-C30-histoneSL |
| 311 | RNA | Rpl31_PpLuc(GC)_RPS9_A64 |
| 317 | RNA | Slc7a3_PpLuc(GC)_PSMB3_A64-C30-histoneSL |
| 318 | RNA | Slc7a3_PpLuc(GC)_PSMB3_A64 |
| 324 | RNA | Slc7a3_PpLuc(GC)_CASP1_A64-C30-histoneSL |
| 325 | RNA | Slc7a3_PpLuc(GC)_CASP1_A64 |
| 331 | RNA | Slc7a3_PpLuc(GC)_COX6B1_A64-C30-histoneSL |
| 332 | RNA | Slc7a3_PpLuc(GC)_COX6B1_A64 |
| 338 | RNA | Slc7a3_PpLuc(GC)_Gnas_A64-C30-histoneSL |
| 339 | RNA | Slc7a3_PpLuc(GC)_Gnas_A64 |
| 345 | RNA | Slc7a3_PpLuc(GC)_Ndufa1_A64-C30-histoneSL |
| 346 | RNA | Slc7a3_PpLuc(GC)_Ndufa1_A64 |
| 352 | RNA | Slc7a3_PpLuc(GC)_RPS9_A64-C30-histoneSL |
| 353 | RNA | Slc7a3_PpLuc(GC)_RPS9_A64 |
| 359 | RNA | TUBB4B_PpLuc(GC)_RPS9_A64-C30-histoneSL |
| 360 | RNA | TUBB4B_PpLuc(GC)_RPS9_A64 |
| 366 | RNA | Ubqln2_PpLuc(GC)_RPS9_A64-C30-histoneSL |
| 367 | RNA | Ubqln2_PpLuc(GC)_RPS9_A64 |
| 375 | RNA | RPL32_PpLuc(GC)_ALB7_A64-C30-histoneSL |
| 376 | RNA | RPL32_PpLuc(GC)_ALB7_A64 |

### Example 3: Increase of Protein of Interest (POI) Expression by Using Specific UTR-Combinations

[0716] HeLa, HDF and HSkM cells were analyzed via in-cell-western blotting:

[0717] Cells were seeded on 96 well plates with black rim & clear optical bottom (Nunc Microplate; Thermo Fisher). HeLa cells or HDF (10,000 cells in 200 μl/well) were seeded 24 hours before transfection in a compatible complete cell medium. HSkMC (48,000 cells in 200 μl/well) were seeded 48 hours before transfection in Differentiation Medium containing 2% horse serum (Gibco) to induce differentiation. Cells were maintained at 37° C., 5% CO2.

[0718] The day of transfection, the complete medium on HeLa or HDF was replaced with serum-free Opti-MEM medium (Thermo Fisher). Medium on HSkMC was exchanged for fresh complete Differentiation Medium.

[0719] Each RNA was complexed with either Lipofectamine2000 at a ratio of 1/1.5 (w/v) (HeLa & HDF) or Lipofectamine3000 at a ratio of 1/2.5 (w/v) (HSkMC) for 20 minutes in Opti-MEM.

[0720] Lipocomplexed mRNAs were then added to cells for transfection with either 200 ng of RNA (HeLa & HDF) or 100 ng of RNA (HSkMC) per well in a total volume of 150 μl.

[0721] 90 minutes post start of transfection, 100 μl/well of transfection solution on HeLa or HDF was exchanged for 100 μl/well of complete medium. Cells were further maintained at 37° C., 5% CO2 before performing In-cell-Western.

[0722] 36 hours post start of transfection, POI expression was quantified by In-Cell-Western using a primary antibody directed against POI (mouse monoclonal anti-POI; Santa Cruz), followed by an IRDye-coupled secondary antibody (IRDye 800CW goat anti-rabbit IgG; LI-COR). All steps of the In-Cell-Western were performed at room temperature.

[0723] First, cells were washed once with PBS and fixed with 3.7% formaldehyde in PBS for 10 minutes. After washing once in PBS, cells were permeabilized with Perm/Wash buffer (BD) for 30 minutes. Cells were blocked for 30 minutes with a mix of Odyssey blocking buffer (PBS) (LI-COR) and Perm/Wash buffer (BD) (1:1).

[0724] Next, cells were incubated for 150 minutes with primary antibody (diluted 1:200 in Perm/Wash buffer (BD)). Cells were then washed 3 times (Perm/Wash buffer (BD)).

[0725] Subsequently, cells were incubated with a mixture of secondary antibody and Cell-Tag 700 Stain (LI-COR) (diluted 1:200 and 1:1000, respectively, in Perm/Wash buffer (BD)) for one hour in the dark.

[0726] After washing 4 times (Perm/Wash buffer (BD)), PBS was added to cells and plates scanned using an Odyssey® CLx Imaging system (LI-COR).

[0727] Fluorescence (800 nm) was quantified using Image Studio Lite Software and the results compared to expression from a reference construct containing the RPL32/ALB7-UTR-combination set to 100%. The sequences of RPL32-derived 5′-UTRs are shown in SEQ ID NO: 21 (DNA) and 22 (RNA). The sequences of ALB7-derived 3′-UTRs are shown in SEQ ID NO: 35 (DNA) and 36 (RNA).

[0728] Sol8 cells were analyzed via routine FACS analysis.

[0729] Cells were seeded on TC Plate 24 well standard F plates (Sarstedt). Sol8 cells (40,000 cells in 1000 μl/well) were seeded 24 hours before transfection in a compatible complete cell medium. Cells were maintained at 37° C., 5% CO₂.

[0730] The day of transfection, the complete medium was replaced with serum-free Opti-MEM medium (Thermo Fisher).

[0731] Each RNA was complexed with either Lipofectamine2000 at a ratio of 1/1.5 (w/v) for 20 minutes in Opti-MEM.

[0732] Lipocomplexed mRNAs were then added to cells for transfection with 500 ng of RNA (per well in a total volume of 1500 μl).

[0733] 190 minutes post start of transfection; the total transfection solution (1500 μl) on Sol8 cells was exchanged for 2000 μl/well of complete medium. Cells were further maintained at 37° C., 5% CO₂ before performing FACS analysis.

[0734] 36 hours post start of transfection, pri expression was quantified by FACS analysis using a primary antibody directed against POI (mouse monoclonal anti-POI; Santa Cruz), followed by an APC-coupled secondary antibody (Goat anti-mouse IgG APC; Biolegend). All steps of the FACS analysis were performed at room temperature or 4° C.

[0735] First, cells were detached (40 mM Tris HCl pH 7.5 150 mM NaCl, 1 mM EDTA in H20; 5 min at RT) washed once with PBS.

[0736] After washing in PBS, intracellular staining was performed by using antibody directed against POI. Therefore the cells were incubated first with Cytofix/Cytoperm (BD) for 30 minutes at 4° C. Next, cells were washed in Perm/Wash buffer (0.5% BSA and 0.1% Saponin in PBS) for 3 minutes. Following, the cells were incubated with primary antibody (diluted 1:200 in Perm/Wash buffer) for 30 min at 4° C.

[0737] After washing on the cells in Perm/Wash buffer (BD), the cells were incubated with the secondary antibody (diluted 1:500 in Perm/Wash buffer) for 30 min at 4° C.

[0738] Cells were then washed (Perm/Wash buffer (BD)), resuspended in 100 μl PFEA buffer (PBS+2% FCS+2 mM EDTA+0.01% NaN3) and analyzed by using BD FACS Canto II.

[0739] Live/Dead staining was performed with Aqua fluorescent reactive dye (Invitrogen).

[0740] Mean fluorescence intensity was measured and the results compared to expression from a reference construct containing the RPL32/ALB7-UTR-combination set to 100%. The sequences of RPL32-derived 5′-UTRs are shown in SEQ ID NO: 21 (DNA) and 22 (RNA). The sequences of ALB7-derived 3′-UTRs are shown in SEQ ID NO: 35 (DNA) and 36 (RNA).

[0741] As apparent, it was possible to significantly increase expression by using the inventive UTR combinations operably linked to the coding region.

### Example 4: Increase of Single Chain Antibody Construct of Interest Expression by Using Specific UTR-Combinations

[0742] Cells were seeded on 96 well plates with black rim & clear optical bottom (Nunc Microplate; Thermo Fisher). HeLa cells (10,000 cells in 200 μl/well) were seeded 24 hours before transfection in a compatible complete cell medium. Cells were maintained at 37° C., 5% CO2.

[0743] The day of transfection, the complete medium on HeLa or HDF was replaced with serum-free Opti-MEM medium (Thermo Fisher). Medium on HSkMC was exchanged for fresh complete differentiation medium.

[0744] 1 μg of single chain antibody construct of interest mRNA [c=0.1 g/l] was complexed with Lipofectamine2000. Part of the transfection complexes was then diluted 5-fold and part was diluted 10-fold (medium dose). 500 ng of single chain antibody construct of interest was then transfected into the cells. 24 hours after transfection, cells were inspected through the microscope. Supernatant was taken and quantified in an Antibody-ELISA/anti Fc-ELISA assay using the coating antibody Goat Anti-Human IgG (SouthernBiotech) and the detection antibody Goat Anti-Human IgG Biotin (Dianova).

[0745] As apparent, it was possible to significantly increase expression by using the inventive UTR combinations operably linked to the coding region.

[0746] An overview of the sequences which were used in this example is shown in Table 4D below, wherein the sequence of the undisclosed antibody construct of interest from Example 4 consists of 496 amino acids and the CDS consists of 1491 nucleic acids, while the antigen construct of interest from Example 5 (Table 4D) consists of 553 amino acids and the CDS consists of 1662 nucleic acids. A person skilled in the art is able to derive a corresponding sequence from the disclosure of Table 4D for Example 4.

### Example 5: Increase of Antigen Construct of Interest Expression by Using Specific UTR-Combinations

[0747] HEK293T cells were analyzed by FACS. 293T cells were seeded at a density of 200 000 cells/well (200 000 cells/2 ml) in a 6-well plate. Each RNA was complexed with Lipofectamine2000 at a ratio of 1/1.5 (w/v) for 20 minutes in Opti-MEM. Lipocomplexed mRNAs were then added to cells for transfection with 2 μg of RNA per well in a total volume of 500 μl. 4h post start of transfection the transfection solution was exchanged for 2000 μl/well of complete medium. Cells were further maintained at 37° C., 5% CO₂ before performing FACS analysis. The sequences which were used in this example are shown in Table 4D.

TABLE 4D
sequences used for protein of interest from example 5

| SEQ | sequence | |
|---|---|---|
| ID NO | type | UTR-combination |
| 45 | protein | protein sequence (wt) from protein of |
| | | interest example 5 |
| 49 | RNA | CDS sequence (wt) POI |
| 53 | RNA | CDS sequence (GC) POI |
| 60 | RNA | HSD17B4_POI_PSMB3_A64-C30-histoneSL |
| 67 | RNA | HSD17B4_POI_CASP1_A64-C30-histoneSL |
| 74 | RNA | HSD17B4_POI_COX6B1_A64-C30-histoneSL |
| 81 | RNA | HSD17B4_POI_Gnas_A64-C30-histoneSL |
| 88 | RNA | HSD17B4_POI_Ndufa1_A64-C30-histoneSL |
| 95 | RNA | HSD17B4_POI_RPS9_A64-C30-histoneSL |
| 102 | RNA | ASAH1_POI_RPS9_A64-C30-histoneSL |
| 109 | RNA | ATP5A1_POI_PSMB3_A64-C30-histoneSL |
| 116 | RNA | ATP5A1_POI_CASP1_A64-C30-histoneSL |
| 123 | RNA | ATP5A1_POI_COX6B1_A64-C30-histoneSL |
| 130 | RNA | ATP5A1_POI_Gnas_A64-C30-histoneSL |
| 137 | RNA | ATP5A1_POI_Ndufa1_A64-C30-histoneSL |
| 144 | RNA | ATP5A1_POI_RPS9_A64-C30-histoneSL |
| 151 | RNA | Mp68_POI_PSMB3_A64-C30-histoneSL |
| 158 | RNA | Mp68_POI_CASP1_A64-C30-histoneSL |
| 165 | RNA | Mp68_POI_COX6B1_A64-C30-histoneSL |
| 172 | RNA | Mp68_POI_Gnas_A64-C30-histoneSL |
| 179 | RNA | Mp68_POI_Ndufa1_A64-C30-histoneSL |
| 186 | RNA | Mp68_POI_RPS9_A64-C30-histoneSL |
| 193 | RNA | Ndufa4_POI_PSMB3_A64-C30-histoneSL |
| 200 | RNA | Ndufa4_POI_CASP1_A64-C30-histoneSL |
| 207 | RNA | Ndufa4_POI_COX6B1_A64-C30-histoneSL |
| 214 | RNA | Ndufa4_POI_Gnas_A64-C30-histoneSL |
| 221 | RNA | Ndufa4_POI_Ndufa1_A64-C30-histoneSL |
| 228 | RNA | Ndufa4_POI_RPS9_A64-C30-histoneSL |
| 235 | RNA | Nosip_POI_PSMB3_A64-C30-histoneSL |
| 242 | RNA | Nosip_POI_CASP1_A64-C30-histoneSL |
| 249 | RNA | Nosip_POI_COX6B1_A64-C30-histoneSL |
| 256 | RNA | Nosip_POI_Gnas_A64-C30-histoneSL |
| 263 | RNA | Nosip_POI_Ndufa1_A64-C30-histoneSL |
| 270 | RNA | Nosip_POI_RPS9_A64-C30-histoneSL |
| 277 | RNA | Rpl31_POI_PSMB3_A64-C30-histoneSL |
| 284 | RNA | Rpl31_POI_CASP1_A64-C30-histoneSL |
| 291 | RNA | Rpl31_POI_COX6B1_A64-C30-histoneSL |
| 298 | RNA | Rpl31_POI_Gnas_A64-C30-histoneSL |
| 305 | RNA | Rpl31_POI_Ndufa1_A64-C30-histoneSL |
| 312 | RNA | Rpl31_POI_RPS9_A64-C30-histoneSL |
| 319 | RNA | Slc7a3_POI_PSMB3_A64-C30-histoneSL |
| 326 | RNA | Slc7a3_POI_CASP1_A64-C30-histoneSL |
| 333 | RNA | Slc7a3_POI_COX6B1_A64-C30-histoneSL |
| 340 | RNA | Slc7a3_POI_Gnas_A64-C30-histoneSL |
| 347 | RNA | Slc7a3_POI_Ndufa1_A64-C30-histoneSL |
| 354 | RNA | Slc7a3_POI_RPS9_A64-C30-histoneSL |
| 361 | RNA | TUBB4B_POI_RPS9_A64-C30-histoneSL |
| 368 | RNA | Ubqln2_POI_RPS9_A64-C30-histoneSL |
| 377 | RNA | RPL32_POI_ALB7_A64-C30-histoneSL |

[0748] 24 hours after transfection, expression of antigen of interest was quantified by FACS analysis using standard procedures. Briefly, cells were detached (40 mM Tris HCl pH 7,5 150 mM NaCl, 1 mM EDTA in H20; 5 min at RT), washed with PBS, and stained on the surface with a mouse antibody against the antigen. Cells were resuspended in 100 μl PFEA buffer (PBS+2% FCS+2 mM EDTA+0.01% NaN₃) and analyzed using a BD FACS Canto II. Live/Dead staining was performed with Aqua fluorescent reactive dye (Invitrogen).

[0749] The results of protein expression from RNAs comprising the inventive UTR combinations operably linked to coding sequences encoding various proteins of interest are shown in FIG. 1-11.

[0750] As apparent, it was possible to significantly and synergically increase expression by using the inventive UTR combinations operably linked to the coding region.

### Example 6: Test for Synergy of UTR Combinations by Luciferase Expression after mRNA Transfection

[0751] Human dermal fibroblasts (HDF) were seeded 24 hours before transfection in a compatible complete cell medium on 96 well plates (10,000 cells in 200 μl/well). The day of transfection, the complete medium was replaced with serum-free Opti-MEM medium (Thermo Fisher).

[0752] Each RNA was complexed with Lipofectamine2000 at a ratio of 1/1.5 (w/v). Lipocomplexed mRNAs were then added to cells for transfection with 25 ng per well in a total volume of 200 μl. 90 minutes post start of transfection, 150 μl/well of transfection solution on HDF was exchanged for 150 μl/well of complete medium. Cells were further maintained at 37° C., 5% CO2. The sequences which were used in this Example correspond to the sequences as shown in Example 2, either with or without 5′ or respectively 3′ UTR or with both 5′ and 3′ UTRs.

[0753] In a first set of experiments, Ppluc expression was measured in cell lysates after 6 hours post start of transfection. Further sets of experiments followed after 24, 48, or 72 hours post start of transfection.

[0754] Cells were lysed by adding 100 μl of 1× passive lysis buffer (Promega, Cat. E1941) for at least 15 minutes. Lysed cells were incubated at −80° C. for at least 1 hour. Lysed cells were thawed and 20 μl were added to white LIA assay plates (Greiner Cat. 655075).

[0755] Luciferase activity was measured as relative light units (RLU) in a Plate Reader (Berthold Technologies TriStar2 LB 942). Plates were introduced into the plate reader with injection device for Beetle-juice (PJK GmbH) containing substrate for firefly luciferase. Per well, 50 μl of beetle-juice were added.

[0756] At the various time points the effect of the various UTR combinations was then determined:
[0757] the increase in expression by the 5′-UTR;
[0758] the increase in expression by the 3′-UTR;
[0759] the increase in expression by the combination of 5′-UTR and 3′-UTR in one mRNA molecule.

[0760] Next, the actual increase by combinations of 5′-UTR and 3′-UTR was divided by the predicted increase if 5′- and 3′-UTRs were acting additively to calculate the Synergy-level. Values of >1 indicates synergy i.e. more than additive effect.

[0761] The results of these experiments are shown in tables 4, 5, 6, and 7, i.e. Ppluc expression after 6, 24, 48, or 72 hours from the start of transfection.

TABLE 4
Ppluc expression in cell lysates after 6 hours post start of transfection.
Plus and minus signs in columns 2 to 5 show the result in presence
or in absence of the respective 5′-UTR or 3′-UTR

| UTR- | 5′/3′- | 5′/3′- | 5′/3′- | 5′/3′- | Synergy- |
|---|---|---|---|---|---|
| combination | UTR −/− | UTR +/− | UTR −/+ | UTR +/+ | level |
| Nosip/CASP1 | 135575 | 381228.5 | 146589 | 527953 | 1.53 |
| Nosip/COX6B1 | 135575 | 381228.5 | 91638 | 368075 | 1.15 |
| Ubqln2/CASP1 | 63374 | 149985 | 73066 | 163658 | 1.04 |

TABLE 5
Ppluc expression in cell lysates after 24 hours post start of transfection.
Plus and minus signs in columns 2 to 5 show the result in presence
or in absence of the respective 5′-UTR or 3′-UTR

| UTR- | 5′/3′- | 5′/3′- | 5′/3′- | 5′/3′- | Synergy- |
|---|---|---|---|---|---|
| combination | UTR −/− | UTR +/− | UTR −/+ | UTR +/+ | level |
| ASAH1/CASP1 | 149542 | 484451 | 212570 | 600505 | 1.13 |
| ASAH1/COX6B1 | 149542 | 484451 | 106921 | 532920 | 1.31 |
| HSD17B4/CASP1 | 149542 | 406947 | 212570 | 674820 | 1.64 |
| HSD17B4/COX6B1 | 149542 | 406947 | 106921 | 407179 | 1.20 |
| HSD17B4/RPS9 | 149542 | 406947 | 138388.5 | 490861 | 1.39 |
| Ndufa4/COX6B1 | 149542 | 274520 | 106921 | 365047 | 2.62 |
| Ndufa4/Ndufa1 | 149542 | 274520 | 90965 | 484980 | 5.05 |
| Nosip/RPS9 | 149542 | 406780.5 | 138388.5 | 632710 | 1.96 |
| Slc7a3/COX6B1 | 149542 | 329237 | 106921 | 472606 | 2.36 |
| Slc7a3/Ndufa1 | 149542 | 329237 | 90965 | 414179 | 2.18 |
| Slc7a3/PSMB3 | 149542 | 329237 | 167562.5 | 404766 | 1.29 |
| Slc7a3/RPS9 | 149542 | 329237 | 138388.5 | 399851 | 1.49 |

TABLE 6
Ppluc expression in cell lysates after 48 hours post start of transfection.
Plus and minus signs in columns 2 to 5 show the result in presence
or in absence of the respective 5′-UTR or 3′-UTR

| UTR- | 5′/3′- | 5′/3′- | 5′/3′- | 5′/3′- | Synergy- |
|---|---|---|---|---|---|
| combination | UTR −/− | UTR +/− | UTR −/+ | UTR +/+ | level |
| ASAH1/Ndufa1 | 54975 | 170288.5 | 35595 | 213333 | 1.65 |
| ASAH1/RPS9 | 54975 | 170288.5 | 60014.5 | 209830 | 1.29 |
| ATP5A1/Ndufa1 | 54975 | 217186 | 35595 | 289947 | 1.65 |
| HSD17B4/Ndufa1 | 54975 | 165220.5 | 35595 | 299354 | 2.69 |
| Mp68/Ndufa1 | 54975 | 160203 | 35595 | 257522 | 2.36 |
| Ndufa4/CASP1 | 54975 | 120018 | 98627 | 198338 | 1.32 |
| Ndufa4/PSMB3 | 54975 | 120018 | 82027 | 252222 | 2.14 |
| Ndufa4/RPS9 | 54975 | 120018 | 60014.5 | 186654 | 1.88 |
| Nosip/PSMB3 | 54975 | 149163 | 82027 | 240696 | 1.53 |
| Rpl31/CASP1 | 54975 | 121611 | 98627 | 258646 | 1.85 |
| Rpl31/COX6B1 | 54975 | 121611 | 60551 | 198202 | 1.98 |
| Rpl31/Ndufa1 | 54975 | 121611 | 35595 | 184597 | 2.74 |
| Rpl31/RPS9 | 54975 | 121611 | 60014.5 | 200615 | 2.03 |
| Slc7a3/CASP1 | 54975 | 162686 | 98627 | 267008 | 1.40 |

TABLE 7
Ppluc expression in cell lysates after 72 hours post start of transfection.
Plus and minus signs in columns 2 to 5 show the result in presence
or in absence of the respective 5′-UTR or 3′-UTR

| UTR- | 5′/3′- | 5′/3′- | 5′/3′- | 5′/3′- | Synergy- |
|---|---|---|---|---|---|
| combination | UTR −/− | UTR +/− | UTR −/+ | UTR +/+ | level |
| ASAH1/PSMB3 | 20629 | 71091.5 | 34584 | 87632 | 1.04 |
| ATP5A1/RPS9 | 20629 | 70800 | 31140 | 90507 | 1.15 |
| Mp68/COX6B1 | 20629 | 55916 | 25431 | 75541 | 1.37 |
| Mp68/PSMB3 | 20629 | 55916 | 34584 | 90988 | 1.43 |
| Rpl31/PSMB3 | 20629 | 48122 | 34584 | 143358 | 2.96 |
| TUBB4B/Ndufa1 | 20629 | 60919 | 19792 | 109249 | 2.25 |
| TUBB4B/RPS9 | 20629 | 60919 | 31140 | 79304 | 1.15 |
| Ubqln2/COX6B1 | 20629 | 63721 | 25431 | 76275 | 1.16 |
| Ubqln2/Ndufa1 | 20629 | 63721 | 19792 | 100361 | 1.89 |
| Ubqln2/PSMB3 | 20629 | 63721 | 34584 | 117729 | 1.70 |
| Ubqln2/RPS9 | 20629 | 63721 | 31140 | 89655 | 1.29 |

[0762] As apparent, it was clearly possible to prove synergy effects of UTR combinations by Luciferase expression.

1. An artificial nucleic acid molecule comprising
a) at least one 5′ untranslated region (5′ UTR) element derived from a 5′ UTR of a gene selected from the group consisting of HSD17B4, ASAH1, ATP5A1, MP68, NDUFA4, NOSIP, RPL31, SLC7A3, TUBB4B and UBQLN2;
b) at least one 3′ untranslated region (3′ UTR) element derived from a 3′ UTR of a gene selected from the group consisting of PSMB3, CASP1, COX6B1, GNAS, NDUFA1 and RPS9; and optionally
c) at least one coding region operably linked to said 5′ UTR and said 3′ UTR.

2. The artificial nucleic acid molecule according to claim 1, wherein said 5′ UTR and/or said 3′ UTR is heterologous to said coding region.

3. (canceled)

4. The artificial nucleic acid molecule according to claim 1, comprising
a-1) at least one 5′ UTR element derived from a 5′UTR of a HSD17B4 gene, or from a corresponding RNA sequence; or
a-2) at least one 5′ UTR element derived from a 5′UTR of a NDUFA4 gene, or from a corresponding RNA sequence; or
a-3) at least one 5′ UTR element derived from a 5′UTR of a SLC7A3 gene, or from a corresponding RNA sequence; or
a-4) at least one 5′ UTR element derived from a 5′UTR of a NOSIP gene, or from a corresponding RNA sequence; or
a-5) at least one 5′ UTR element derived from a 5′UTR of a MP68 gene, or from a corresponding RNA sequence; or
b-1) at least one 5′ UTR element derived from a 5′UTR of a UBQLN2 gene, or from a corresponding RNA sequence; or
b-2) at least one 5′ UTR element derived from a 5′UTR of a ASAH1 gene, or from a corresponding RNA sequence; or
b-3) at least one 5′ UTR element derived from a 5′UTR of a HSD17B4 gene, or from a corresponding RNA sequence; or
b-4) at least one 5′ UTR element derived from a 5′UTR of a HSD17B4 gene, or from a corresponding RNA sequence; or
b-5) at least one 5′ UTR element derived from a 5′UTR of a NOSIP gene, or from a corresponding RNA sequence; or
c-1) at least one 5′ UTR element derived from a 5′UTR of a NDUFA4 gene, or from a corresponding RNA sequence; or
c-2) at least one 5′ UTR element derived from a 5′UTR of a NOSIP gene, or from a corresponding RNA sequence; or
c-3) at least one 5′ UTR element derived from a 5′UTR of a NDUFA4 gene, or from a corresponding RNA sequence; or
c-4) at least one 5′ UTR element derived from a 5′UTR of a NDUFA4 gene, or from a corresponding RNA sequence; or
c-5) at least one 5′ UTR element derived from a 5′UTR of a ATP5A1 gene, or from a corresponding RNA sequence; or
d-1) at least one 5′ UTR element derived from a 5′UTR of a RPL31 gene, or from a corresponding RNA sequence; or
d-2) at least one 5′ UTR element derived from a 5′UTR of a ATP5A1 gene, or from a corresponding RNA sequence; or
d-3) at least one 5′ UTR element derived from a 5′UTR of a SLC7A3 gene, or from a corresponding RNA sequence; or
d-4) at least one 5′ UTR element derived from a 5′UTR of a HSD17B4 gene, or from a corresponding RNA sequence; or
d-5) at least one 5′ UTR element derived from a 5′UTR of a SLC7A3 gene, or from a corresponding RNA sequence; or
e-1) at least one 5′ UTR element derived from a 5′UTR of a TUBB4B gene, or from a corresponding RNA sequence; or
e-2) at least one 5′ UTR element derived from a 5′UTR of a RPL31 gene, or from a corresponding RNA sequence, or
e-3) at least one 5′ UTR element derived from a 5′UTR of a MP68 gene, or from a corresponding RNA sequence; or
e-4) at least one 5′ UTR element derived from a 5′UTR of a NOSIP gene, or from a corresponding RNA sequence; or
e-5) at least one 5′ UTR element derived from a 5′UTR of a ATP5A1 gene, or from a corresponding RNA sequence; or
e-6) at least one 5′ UTR element derived from a 5′UTR of a ATP5A1 gene, or from a corresponding RNA sequence; or
f-1) at least one 5′ UTR element derived from a 5′UTR of a ATP5A1 gene, or from a corresponding RNA sequence; or
f-2) at least one 5′ UTR element derived from a 5′UTR of a ATP5A1 gene, or from a corresponding RNA sequence; or
f.3) at least one 5′ UTR element derived from a 5′UTR of a HSD17B4 gene, or from a corresponding RNA sequence; or
f-4) at least one 5′ UTR element derived from a 5′UTR of a HSD17B4 gene, or from a corresponding RNA sequence; or
f-5) at least one 5′ UTR element derived from a 5′UTR of a MP68 gene, or from a corresponding RNA sequence; or
g-1) at least one 5′ UTR element derived from a 5′UTR of a MP68 gene, or from a corresponding RNA sequence; or
g-2) at least one 5′ UTR element derived from a 5′UTR of a NDUFA4 gene or from a corresponding RNA sequence; or
g-3) at least one 5′ UTR element derived from a 5′UTR of a NDUFA4 gene, or from a corresponding RNA sequence; or
g-4) at least one 5′ UTR element derived from a 5′UTR of a NOSIP gene, or from a corresponding RNA sequence; or
g-5) at least one 5′ UTR element derived from a 5′UTR of a RPL31 gene, or from a corresponding RNA sequence; or
h-1) at least one 5′ UTR element derived from a 5′UTR of a RPL31 gene, or from a corresponding RNA sequence; or
h-2) at least one 5′ UTR element derived from a 5′UTR of a RPL31 gene, or from a corresponding RNA sequence; or
h-3) at least one 5′ UTR element derived from a 5′UTR of a RPL31 gene, or from a corresponding RNA sequence; or
h-4) at least one 5′ UTR element derived from a 5′UTR of a SLC7A3 gene, or from a corresponding RNA sequence; or
h-5) at least one 5′ UTR element derived from a 5′UTR of a SLC7A3 gene, or from a corresponding RNA sequence; or
i-1) at least one 5′ UTR element derived from a 5′UTR of a SLC7A3 gene, or from a corresponding RNA sequence; or
i-2) at least one 5′ UTR element derived from a 5′UTR of a Ndufa4.1 gene, or from a corresponding RNA sequence.

5. The artificial nucleic acid molecule according to claim 4, comprising UTR elements according to a-1, a-2, a-3, a-4 or a-5.

6-10. (canceled)

11. The artificial nucleic acid molecule according to claim 1, wherein the at least one coding region encodes at least one (poly-)peptide or protein of interest.

12. The artificial nucleic acid molecule according to claim 11, wherein said at least one antigenic (poly-)peptide or protein is selected from a tumor antigen, a pathogenic antigen, an autoantigen, an alloantigen, or an allergenic antigen.

13. The artificial nucleic acid molecule according to claim 12, wherein said at least one pathogenic antigen is selected from a bacterial, viral, fungal or protozoal antigen.

14-18. (canceled)

19. The artificial nucleic acid molecule according to claim 1, wherein said artificial nucleic acid molecule is an RNA.

20. (canceled)

21. The artificial nucleic acid molecule according to claim 19, wherein the RNA is an mRNA, a viral RNA, self-replicating RNA or a replicon RNA.

22. (canceled)

23. The artificial nucleic acid molecule according to claim 1, wherein
the G/C content of the at least one coding region of the artificial nucleic acid is increased compared to the G/C content of the corresponding coding sequence of the corresponding wild-type artificial nucleic acid, and/or wherein
the C content of the at least one coding region of the artificial nucleic acid is increased compared to the C content of the corresponding coding sequence of the corresponding wild-type artificial nucleic acid, and/or wherein
the codons in the at least one coding region of the artificial nucleic acid are adapted to human codon usage, wherein the codon adaptation index (CAI) is preferably increased or maximised in the at least one coding sequence of the artificial nucleic acid,
wherein the amino acid sequence encoded by the artificial nucleic acid is preferably not being modified compared to the amino acid sequence encoded by the corresponding wild-type artificial nucleic acid.

24. The artificial nucleic acid molecule according to claim 1, which comprises a 5′-CAP structure.

25. The artificial nucleic acid molecule according to claim 19, which comprises at least one histone stem-loop.

26-27. (canceled)

28. The artificial nucleic acid molecule according to claim 19, comprising a poly(A) sequence of 10 to 200 adenosine nucleotides.

29-30. (canceled)

31. A composition comprising at least one or a plurality of artificial nucleic acid molecule(s) according to claim 1 and a pharmaceutically acceptable carrier and/or excipient.

32-43. (canceled)

44. A kit comprising the artificial nucleic acid molecule according to claim 1, and optionally a liquid vehicle and/or optionally technical instructions with information on the administration and dosage of the artificial nucleic acid molecule.

45-51. (canceled)

52. A method of treating or preventing a disorder optionally selected from genetic diseases, cancer, infectious diseases, inflammatory diseases, (auto)immune diseases, allergies, and/or for use in gene therapy and/or immunomodulation, wherein said method comprises administering to a subject in need thereof an effective amount of the artificial nucleic acid molecule according to claim 1.

53-54. (canceled)

55. The artificial nucleic acid molecule according to claim 4, comprising UTR elements according to a-1.

56. The artificial nucleic acid molecule according to claim 55, wherein said 5′UTR element derived from a HSD17B4 gene comprises a sequence at least 95% identical to the sequence of SEQ ID NO: 1.

57. The artificial nucleic acid molecule according to claim 1, wherein said 3′UTR element derived from a PSMB3 gene comprises a sequence at least 95% identical to the sequence of SEQ ID NO: 23.

58. The artificial nucleic acid molecule according to claim 1, wherein the artificial nucleic acid sequence is a RNA and wherein the RNA comprises:
a 5′ UTR element derived from a HSD17B4 gene comprises a sequence at least 95% identical to the sequence of SEQ ID NO: 1; and
3′ UTR element derived from a PSMB3 gene comprises a sequence at least 95% identical to the sequence of SEQ ID NO: 23.

The application's sequence listing, which the Patent Office published only in electronic form, follows.

SEQUENCE LISTING (384 sequences)

SEQ ID NO: 1 - DNA, 62 bp, Artificial Sequence
  5'-UTR of human peroxisomal multifunctional enzyme type 2 lacking the 5' terminal oligopyrimidine tract (HSD17B4)
gtcccgcagtcggcgtccagcggctctgcttgttcgtgtgtgtgtcgttgcaggccttattc

SEQ ID NO: 2 - RNA, 62 nt, Artificial Sequence
  5'-UTR of human peroxisomal multifunctional enzyme type 2 lacking the 5' terminal oligopyrimidine tract (HSD17B4) mRNA
gucccgcagucggcguccagcggcucugcuuguucgugugugugucguugcaggccuuauuc

SEQ ID NO: 3 - DNA, 42 bp, Artificial Sequence
  5'-UTR of human acid ceramidase lacking the 5' terminal oligopyrimidine tract (ASAH1)
gcctctgctggagtccggggagtggcgttggctgctagagcg

SEQ ID NO: 4 - RNA, 42 nt, Artificial Sequence
  5'-UTR of human acid ceramidase lacking the 5' terminal oligopyrimidine tract (ASAH1) mRNA
gccucugcuggaguccggggaguggcguuggcugcuagagcg

SEQ ID NO: 5 - DNA, 75 bp, Artificial Sequence
  5'-UTR of human mitochondrial ATP synthase subunit alpha lacking the 5' terminal oligopyrimidine tract (ATP5A1)
gcggctcggccattttgtcccagtcagtccggaggctgcggctgcagaagtaccgcctgcggagtaactgcaaag

SEQ ID NO: 6 - RNA, 75 nt, Artificial Sequence
  5'-UTR of human mitochondrial ATP synthase subunit alpha lacking the 5' terminal oligopyrimidine tract (ATP5A1) mRNA
gcggcucggccauuuugucccagucaguccggaggcugcggcugcagaaguaccgccugcggaguaacugcaaag

SEQ ID NO: 7 - DNA, 54 bp, Artificial Sequence
  5'-UTR of mouse RIKEN cDNA 2010107E04 gene (Mp68, 2010107E04Rik)
ctttcccattctgtagcagaatttggtgttgcctgtggtcttggtcccgcggag

SEQ ID NO: 8 - RNA, 54 nt, Artificial Sequence
  5'-UTR of mouse RIKEN cDNA 2010107E04 gene (Mp68, 2010107E04Rik) mRNA
cuuucccauucuguagcagaauuugguguugccuguggucuuggucccgcggag

SEQ ID NO: 9 - DNA, 81 bp, Artificial Sequence
  5'-UTR of mouse NADH dehydrogenase (ubiquinone) 1 alpha subcomplex, 4 (Ndufa4)
gtccgctcagccaggttgcagaagcggcttagcgtgtgtcctaatcttctctctgcgtgtaggtaggcctgtgccgcaaac

SEQ ID NO: 10 - RNA, 81 nt, Artificial Sequence
  5'-UTR of mouse NADH dehydrogenase (ubiquinone) 1 alpha subcomplex, 4 (Ndufa4) mRNA
guccgcucagccagguugcagaagcggcuuagcguguguccuaaucuucucucugcguguagguaggccugugccgcaaac

SEQ ID NO: 11 - DNA, 108 bp, Artificial Sequence
  5'-UTR of mouse nitric oxide synthase interacting protein (Nosip)
ctcctgtcgggcggaagtaggaggagtagagtttaaaaacagtactctttttccggttcgggacgtagttgaagcaacgacaagccggataaccgctcttgagacagg

SEQ ID NO: 12 - RNA, 108 nt, Artificial Sequence
  5'-UTR of mouse nitric oxide synthase interacting protein (Nosip) mRNA
cuccugucgggcggaaguaggaggaguagaguuuaaaaacaguacucuuuuuccgguucgggacguaguugaagcaacgacaagccggauaaccgcucuugagacagg

SEQ ID NO: 13 - DNA, 84 bp, Artificial Sequence
  5'-UTR of mouse ribosomal protein L31 (Rpl31)
cccgtgacccggaagttgtacggctacgcgactttccctcccacaaaccctcgcgcccttcctttcctacttgggcccggcaga

SEQ ID NO: 14 - RNA, 84 nt, Artificial Sequence
  5'-UTR of mouse ribosomal protein L31 (Rpl31) mRNA
cccgugacccggaaguuguacggcuacgcgacuuucccucccacaaacccucgcgcccuuccuuuccuacuugggcccggcaga

SEQ ID NO: 15 - DNA, 159 bp, Artificial Sequence
  5'-UTR of mouse solute carrier family 7 (cationic amino acid transporter, y+ system), member 3 (Slc7a3)
gggcgcttggcttgcaaggaccctgagctgcggcattgaagcacacccaacccaactcgactgaagtcagcctcactgaaccggatctgagaatcttctctctctgggcttgccagggctctccgaacctagctagcatcctcttcaattccaactaga

SEQ ID NO: 16 - RNA, 159 nt, Artificial Sequence
  5'-UTR of mouse solute carrier family 7 (cationic amino acid transporter, y+ system), member 3 (Slc7a3) mRNA
gggcgcuuggcuugcaaggacccugagcugcggcauugaagcacacccaacccaacucgacugaagucagccucacugaaccggaucugagaaucuucucucucugggcuugccagggcucuccgaaccuagcuagcauccucuucaauuccaacuaga

SEQ ID NO: 17 - DNA, 102 bp, Artificial Sequence
  5'-UTR of human tubulin beta 4B class Ivb (TUBB4B)
atataagcgttggcggagcgtcggttgtagcactctgcgcgcccgctcttctgctgctgtttgtctacttcctcctgcttccccgccgccgccgccgccatc

SEQ ID NO: 18 - RNA, 102 nt, Artificial Sequence
  5'-UTR of human tubulin beta 4B class Ivb (TUBB4B) mRNA
auauaagcguuggcggagcgucgguuguagcacucugcgcgcccgcucuucugcugcuguuugucuacuuccuccugcuuccccgccgccgccgccgccauc

SEQ ID NO: 19 - DNA, 222 bp, Artificial Sequence
  5'-UTR of mouse ubiquilin 2 (Ubqln2)
cggagacggcctgcaggacctgctctctcagccctcagccgaggcctacgccgagccgagtgcgcagccgacgaccgggaggagccgcagccttcaactctgaggtactgtgatccgcgctgcccgccgggccgccccagtccgctgctgcggcacctccttccctcgcgccctcttcgctcgccagcgccttccctgtgagcctgcgtcaccgcggccgcc

SEQ ID NO: 20 - RNA, 222 nt, Artificial Sequence
  5'-UTR of mouse ubiquilin 2 (Ubqln2)  mRNA
cggagacggccugcaggaccugcucucucagcccucagccgaggccuacgccgagccgagugcgcagccgacgaccgggaggagccgcagccuucaacucugagguacugugauccgcgcugcccgccgggccgccccaguccgcugcugcggcaccuccuucccucgcgcccucuucgcucgccagcgccuucccugugagccugcgucaccgcggccgcc

SEQ ID NO: 21 - DNA, 42 bp, Artificial Sequence
  5'-UTR of human ribosomal protein Large 32 lacking the 5' terminal oligopyrimidine tract (RPL32, 32L4)
ggcgctgcctacggaggtggcagccatctccttctcggcatc

SEQ ID NO: 22 - RNA, 42 nt, Artificial Sequence
  5'-UTR of human ribosomal protein Large 32 lacking the 5' terminal oligopyrimidine tract (RPL32, 32L4) mRNA
ggcgcugccuacggagguggcagccaucuccuucucggcauc

SEQ ID NO: 23 - DNA, 57 bp, Artificial Sequence
  3'-UTR of human proteasome subunit beta 3 (PSMB3)
ccctgttcccagagcccacttttttttctttttttgaaataaaatagcctgtctttc

SEQ ID NO: 24 - RNA, 57 nt, Artificial Sequence
  3'-UTR of human proteasome subunit beta 3 (PSMB3) mRNA
cccuguucccagagcccacuuuuuuuucuuuuuuugaaauaaaauagccugucuuuc

SEQ ID NO: 25 - DNA, 121 bp, Artificial Sequence
  3'-UTR of human caspase 1 (CASP1)
aataaggaaactgtatgaatgtctgtgggcaggaagtgaagagatccttctgtaaaggtttttggaattatgtctgctgaataataaacttttttgaaataataaatctggtagaaaaatg

SEQ ID NO: 26 - RNA, 121 nt, Artificial Sequence
  3'-UTR of human caspase 1 (CASP1) mRNA
aauaaggaaacuguaugaaugucugugggcaggaagugaagagauccuucuguaaagguuuuuggaauuaugucugcugaauaauaaacuuuuuugaaauaauaaaucugguagaaaaaug

SEQ ID NO: 27 - DNA, 137 bp, Artificial Sequence
  3'-UTR of human cytochrome c oxidase subunit 6B1 (COX6B1)
actggctgcatctccctttcctctgtcctccatccttctcccaggatggtgaagggggacctggtacccagtgatccccaccccaggatcctaaatcatgacttacctgctaataaaaactcattggaaaagtgaga

SEQ ID NO: 28 - RNA, 137 nt, Artificial Sequence
  3'-UTR of human cytochrome c oxidase subunit 6B1 (COX6B1) mRNA
acuggcugcaucucccuuuccucuguccuccauccuucucccaggauggugaagggggaccugguacccagugauccccaccccaggauccuaaaucaugacuuaccugcuaauaaaaacucauuggaaaagugaga

SEQ ID NO: 29 - DNA, 353 bp, Artificial Sequence
  3'-UTR of mouse GNAS (guanine nucleotide binding protein, alpha stimulating) complex locus (Gnas)
gaagggaacacccaaatttaattcagccttaagcacaattaattaagagtgaaacgtaattgtacaagcagttggtcacccaccatagggcatgatcaacaccgcaacctttcctttttcccccagtgattctgaaaaacccctcttcccttcagcttgcttagatgttccaaatttagtaagcttaaggcggcctacagaagaaaaagaaaaaaaaggccacaaaagttccctctcactttcagtaaataaaataaaagcagcaacagaaataaagaaataaatgaaattcaaaatgaaataaatattgtgttgtgcagcattaaaaaatcaataaaaattaaaaatgagca

SEQ ID NO: 30 - RNA, 353 nt, Artificial Sequence
  3'-UTR of mouse GNAS (guanine nucleotide binding protein, alpha stimulating) complex locus (Gnas) mRNA
gaagggaacacccaaauuuaauucagccuuaagcacaauuaauuaagagugaaacguaauuguacaagcaguuggucacccaccauagggcaugaucaacaccgcaaccuuuccuuuuucccccagugauucugaaaaaccccucuucccuucagcuugcuuagauguuccaaauuuaguaagcuuaaggcggccuacagaagaaaaagaaaaaaaaggccacaaaaguucccucucacuuucaguaaauaaaauaaaagcagcaacagaaauaaagaaauaaaugaaauucaaaaugaaauaaauauuguguugugcagcauuaaaaaaucaauaaaaauuaaaaaugagca

SEQ ID NO: 31 - DNA, 133 bp, Artificial Sequence
  3'-UTR of mouse NADH dehydrogenase (ubiquinone) 1 alpha subcomplex, 1 (Ndufa1)
ggaagcattttcctggctgattaaaagaaattactcagctatggtcatctgttcctgttagaaggctatgcagcatattatatactatgcgcatgttatgaaatgcataataaaaaattttaaaaaatctaaa

SEQ ID NO: 32 - RNA, 133 nt, Artificial Sequence
  3'-UTR of mouse NADH dehydrogenase (ubiquinone) 1 alpha subcomplex, 1 (Ndufa1) mRNA
ggaagcauuuuccuggcugauuaaaagaaauuacucagcuauggucaucuguuccuguuagaaggcuaugcagcauauuauauacuaugcgcauguuaugaaaugcauaauaaaaaauuuuaaaaaaucuaaa

SEQ ID NO: 33 - DNA, 70 bp, Artificial Sequence
  3'-UTR of human ribosomal protein S9 (RPS9)
gtccacctgtccctcctgggctgctggattgtctcgttttcctgccaaataaacaggatcagcgctttac

SEQ ID NO: 34 - RNA, 70 nt, Artificial Sequence
  3'-UTR of human ribosomal protein S9 (RPS9) mRNA
guccaccugucccuccugggcugcuggauugucucguuuuccugccaaauaaacaggaucagcgcuuuac

SEQ ID NO: 35 - DNA, 187 bp, Artificial Sequence
  3'-UTR ALB7
gcatcacatttaaaagcatctcagcctaccatgagaataagagaaagaaaatgaagatcaatagcttattcatctctttttctttttcgttggtgtaaagccaacaccctgtctaaaaaacataaatttctttaatcattttgcctcttttctctgtgcttcaattaataaaaaatggaaagaacct

SEQ ID NO: 36 - RNA, 187 nt, Artificial Sequence
  3'-UTR ALB7 mRNA
gcaucacauuuaaaagcaucucagccuaccaugagaauaagagaaagaaaaugaagaucaauagcuuauucaucucuuuuucuuuuucguugguguaaagccaacacccugucuaaaaaacauaaauuucuuuaaucauuuugccucuuuucucugugcuucaauuaauaaaaaauggaaagaaccu

SEQ ID NO: 37 - DNA, 24 bp, Artificial Sequence
  histone stem-loop sequence (histoneSL, hSL)
caaaggctcttttcagagccacca

SEQ ID NO: 38 - RNA, 24 nt, Artificial Sequence
  histone stem-loop sequence (histoneSL, hSL) mRNA
caaaggcucuuuucagagccacca

SEQ ID NO: 39 - DNA, 13 bp, Artificial Sequence
  Kozak
gccgccaccatgg

SEQ ID NO: 40 - RNA, 13 nt, Artificial Sequence
  Kozak mRNA
gccgccaccaugg

SEQ ID NO: 41 - skipped

SEQ ID NO: 42 - protein, 524 aa, Artificial Sequence
  derived and/or modified protein sequence (wt) from RAV__M13215.1__glycoprotein__RAV-G
MVPQALLFVPLLVFPLCFGKFPIYTIPDKLGPWSPIDIHHLSCPNNLVVEDEGCTNLSGFSYMELKVGYISAIKMNGFTCTGVVTEAETYTNFVGYVTTTFKRKHFRPTPDACRAAYNWKMAGDPRYEESLHNPYPDYHWLRTVKTTKESLVIISPSVADLDPYDRSLHSRVFPGGNCSGVAVSSTYCSTNHDYTIWMPENPRLGMSCDIFTNSRGKRASKGSETCGFVDERGLYKSLKGACKLKLCGVLGLRLMDGTWVAMQTSNETKWCPPGQLVNLHDFRSDEIEHLVVEELVKKREECLDALESIMTTKSVSFRRLSHLRKLVPGFGKAYTIFNKTLMEADAHYKSVRTWNEIIPSKGCLRVGGRCHPHVNGVFFNGIILGPDGNVLIPEMQSSLLQQHMELLVSSVIPLMHPLADPSTVFKNGDEAEDFVEVHLPDVHERISGVDLGLPNWGKYVLLSAGALTALMLIIFLMTCWRRVNRSEPTQHNLRGTGREVSVTPQSGKIISSWESYKSGGETGL

SEQ ID NO: 43 - protein, 193 aa, Artificial Sequence
  derived and/or modified protein sequence (wt) from Homo sapiens__NM_000799.2__erythropoietin__HsEPO
MGVHECPAWLWLLLSLLSLPLGLPVLGAPPRLICDSRVLERYLLEAKEAENITTGCAEHCSLNENITVPDTKVNFYAWKRMEVGQQAVEVWQGLALLSEAVLRGQALLVNSSQPWEPLQLHVDKAVSGLRSLTTLLRALGAQKEAISPPDAASAAPLRTITADTFRKLFRVYSNFLRGKLKLYTGEACRTGDR

SEQ ID NO: 44 - protein, 550 aa, Artificial Sequence
  derived and/or modified protein sequence (wt) from Photinus pyralis__U47122.2__luciferase__PpLuc
MEDAKNIKKGPAPFYPLEDGTAGEQLHKAMKRYALVPGTIAFTDAHIEVDITYAEYFEMSVRLAEAMKRYGLNTNHRIVVCSENSLQFFMPVLGALFIGVAVAPANDIYNERELLNSMGISQPTVVFVSKKGLQKILNVQKKLPIIQKIIIMDSKTDYQGFQSMYTFVTSHLPPGFNEYDFVPESFDRDKTIALIMNSSGSTGLPKGVALPHRTACVRFSHARDPIFGNQIIPDTAILSVVPFHHGFGMFTTLGYLICGFRVVLMYRFEEELFLRSLQDYKIQSALLVPTLFSFFAKSTLIDKYDLSNLHEIASGGAPLSKEVGEAVAKRFHLPGIRQGYGLTETTSAILITPEGDDKPGAVGKVVPFFEAKVVDLDTGKTLGVNQRGELCVRGPMIMSGYVNNPEATNALIDKDGWLHSGDIAYWDEDEHFFIVDRLKSLIKYKGYQVAPAELESILLQHPNIFDAGVAGLPDDDAGELPAAVVVLEHGKTMTEKEIVDYVASQVTTAKKLRGGVVFVDEVPKGLTGKLDARKIREILIKAKKGGKIAV

SEQ ID NO: 45 - protein, 553 aa, Artificial Sequence
  derived and/or modified protein sequence (wt) from protein of interest example 5
  misc_feature (1)..(553): Xaa can be any naturally occurring amino acid
XXXXXXXXXXXXXXXXXXXXXXXXXXXXXXXXXXXXXXXXXXXXXXXXXXXXXXXXXXXXXXXXXXXXXXXXXXXXXXXXXXXXXXXXXXXXXXXXXXXXXXXXXXXXXXXXXXXXXXXXXXXXXXXXXXXXXXXXXXXXXXXXXXXXXXXXXXXXXXXXXXXXXXXXXXXXXXXXXXXXXXXXXXXXXXXXXXXXXXXXXXXXXXXXXXXXXXXXXXXXXXXXXXXXXXXXXXXXXXXXXXXXXXXXXXXXXXXXXXXXXXXXXXXXXXXXXXXXXXXXXXXXXXXXXXXXXXXXXXXXXXXXXXXXXXXXXXXXXXXXXXXXXXXXXXXXXXXXXXXXXXXXXXXXXXXXXXXXXXXXXXXXXXXXXXXXXXXXXXXXXXXXXXXXXXXXXXXXXXXXXXXXXXXXXXXXXXXXXXXXXXXXXXXXXXXXXXXXXXXXXXXXXXXXXXXXXXXXXXXXXXXXXXXXXXXXXXXXXXXXXXXXXXXXXXXXXXXXXXXXXXXXXXXXXXXXXXXXXXXXXXXXXXXXXXXXXXXXXXXXXXXXXXXXXXXXX

SEQ ID NO: 46 - RNA, 1575 nt, Artificial Sequence
  derived and/or modified CDS sequence (wt) from RAV__M13215.1__glycoprotein__RAV-G
augguuccucaggcucuccuguuuguaccccuucugguuuuuccauuguguuuugggaaauucccuauuuacacgauaccagacaagcuuggucccuggagcccgauugacauacaucaccucagcugcccaaacaauuugguaguggaggacgaaggaugcaccaaccugucaggguucuccuacauggaacuuaaaguuggauacaucucagccauaaaaaugaacggguucacuugcacaggcguugugacggaggcugaaaccuacacuaacuucguugguuaugucacaaccacguucaaaagaaagcauuuccgcccaacaccagaugcauguagagccgcguacaacuggaagauggccggugaccccagauaugaagagucucuacacaauccguacccugacuaccacuggcuucgaacuguaaaaaccaccaaggagucucucguuaucauaucuccaaguguggcagauuuggacccauaugacagaucccuucacucgagggucuucccuggcgggaauugcucaggaguagcggugucuucuaccuacugcuccacuaaccacgauuacaccauuuggaugcccgagaauccgagacuagggaugucuugugacauuuuuaccaauaguagagggaagagagcauccaaagggagugagacuugcggcuuuguagaugaaagaggccuauauaagucuuuaaaaggagcaugcaaacucaaguuauguggaguucuaggacuuagacuuauggauggaacaugggucgcgaugcaaacaucaaaugaaaccaaauggugcccucccggucaguuggugaauuugcacgacuuucgcucagacgaaauugagcaccuuguuguagaggaguuggucaagaagagagaggagugucuggaugcacuagaguccaucaugaccaccaagucagugaguuucagacgucucagucauuuaagaaaacuugucccuggguuuggaaaagcauauaccauauucaacaagaccuugauggaagccgaugcucacuacaagucagucagaacuuggaaugagaucaucccuucaaaaggguguuuaagaguuggggggaggugucauccucauguaaacgggguauuuuucaaugguauaauauuaggaccugacggcaaugucuuaaucccagagaugcaaucaucccuccuccagcaacauauggaguuguugguauccucgguuaucccccuuaugcacccccuggcagacccgucuaccguuuucaagaacggugacgaggcugaggauuuuguugaaguucaccuucccgaugugcacgaacggaucucaggaguugacuugggucucccgaacugggggaaguauguauuacugagugcaggggcccugacugccuugauguugauaauuuuccugaugacaugcuggagaagagucaaucgaucggaaccuacacaacacaaucucagagggacagggagggaggugucagucacuccccaaagcgggaagaucauaucuucaugggaaucauacaagagcgggggugagaccggacuguga

SEQ ID NO: 47 - RNA, 582 nt, Artificial Sequence
  derived and/or modified CDS sequence (wt) from Homo sapiens__NM_000799.2__erythropoietin__HsEPO
augggggugcacgaauguccugccuggcuguggcuucuccugucccugcugucgcucccucugggccucccaguccugggcgccccaccacgccucaucugugacagccgaguccuggagagguaccucuuggaggccaaggaggccgagaauaucacgacgggcugugcugaacacugcagcuugaaugagaauaucacugucccagacaccaaaguuaauuucuaugccuggaagaggauggaggucgggcagcaggccguagaagucuggcagggccuggcccugcugucggaagcuguccugcggggccaggcccuguuggucaacucuucccagccgugggagccccugcagcugcauguggauaaagccgucaguggccuucgcagccucaccacucugcuucgggcucugggagcccagaaggaagccaucuccccuccagaugcggccucagcugcuccacuccgaacaaucacugcugacacuuuccgcaaacucuuccgagucuacuccaauuuccuccggggaaagcugaagcuguacacaggggaggccugcaggacaggggacagauga

SEQ ID NO: 48 - RNA, 1653 nt, Artificial Sequence
  derived and/or modified CDS sequence (wt) from Photinus pyralis__U47122.2__luciferase__PpLuc
auggaagacgccaaaaacauaaagaaaggcccggcgccauucuauccgcuggaagauggaaccgcuggagagcaacugcauaaggcuaugaagagauacgcccugguuccuggaacaauugcuuuuacagaugcacauaucgagguggacaucacuuacgcugaguacuucgaaauguccguucgguuggcagaagcuaugaaacgauaugggcugaauacaaaucacagaaucgucguaugcagugaaaacucucuucaauucuuuaugccgguguugggcgcguuauuuaucggaguugcaguugcgcccgcgaacgacauuuauaaugaacgugaauugcucaacaguaugggcauuucgcagccuaccgugguguucguuuccaaaaagggguugcaaaaaauuuugaacgugcaaaaaaagcucccaaucauccaaaaaauuauuaucauggauucuaaaacggauuaccagggauuucagucgauguacacguucgucacaucucaucuaccucccgguuuuaaugaauacgauuuugugccagaguccuucgauagggacaagacaauugcacugaucaugaacuccucuggaucuacuggucugccuaaaggugucgcucugccucauagaacugccugcgugagauucucgcaugccagagauccuauuuuuggcaaucaaaucauuccggauacugcgauuuuaaguguuguuccauuccaucacgguuuuggaauguuuacuacacucggauauuugauauguggauuucgagucgucuuaauguauagauuugaagaagagcuguuucugaggagccuucaggauuacaagauucaaagugcgcugcuggugccaacccuauucuccuucuucgccaaaagcacucugauugacaaauacgauuuaucuaauuuacacgaaauugcuucugguggcgcuccccucucuaaggaagucggggaagcgguugccaagagguuccaucugccagguaucaggcaaggauaugggcucacugagacuacaucagcuauucugauuacacccgagggggaugauaaaccgggcgcggucgguaaaguuguuccauuuuuugaagcgaagguuguggaucuggauaccgggaaaacgcugggcguuaaucaaagaggcgaacugugugugagagguccuaugauuauguccgguuauguaaacaauccggaagcgaccaacgccuugauugacaaggauggauggcuacauucuggagacauagcuuacugggacgaagacgaacacuucuucaucguugaccgccugaagucucugauuaaguacaaaggcuaucagguggcucccgcugaauuggaauccaucuugcuccaacaccccaacaucuucgacgcaggugucgcaggucuucccgacgaugacgccggugaacuucccgccgccguuguuguuuuggagcacggaaagacgaugacggaaaaagagaucguggauuacgucgccagucaaguaacaaccgcgaaaaaguugcgcggaggaguuguguuuguggacgaaguaccgaaaggucuuaccggaaaacucgacgcaagaaaaaucagagagauccucauaaaggccaagaagggcggaaagaucgccguguaa

SEQ ID NO: 49 - RNA, 1662 nt, Artificial Sequence
  derived and/or modified CDS sequence (wt) from protein of interest example 5
  misc_feature (1)..(1662): n is a, c, g, or u
nnnnnnnnnnnnnnnnnnnnnnnnnnnnnnnnnnnnnnnnnnnnnnnnnnnnnnnnnnnnnnnnnnnnnnnnnnnnnnnnnnnnnnnnnnnnnnnnnnnnnnnnnnnnnnnnnnnnnnnnnnnnnnnnnnnnnnnnnnnnnnnnnnnnnnnnnnnnnnnnnnnnnnnnnnnnnnnnnnnnnnnnnnnnnnnnnnnnnnnnnnnnnnnnnnnnnnnnnnnnnnnnnnnnnnnnnnnnnnnnnnnnnnnnnnnnnnnnnnnnnnnnnnnnnnnnnnnnnnnnnnnnnnnnnnnnnnnnnnnnnnnnnnnnnnnnnnnnnnnnnnnnnnnnnnnnnnnnnnnnnnnnnnnnnnnnnnnnnnnnnnnnnnnnnnnnnnnnnnnnnnnnnnnnnnnnnnnnnnnnnnnnnnnnnnnnnnnnnnnnnnnnnnnnnnnnnnnnnnnnnnnnnnnnnnnnnnnnnnnnnnnnnnnnnnnnnnnnnnnnnnnnnnnnnnnnnnnnnnnnnnnnnnnnnnnnnnnnnnnnnnnnnnnnnnnnnnnnnnnnnnnnnnnnnnnnnnnnnnnnnnnnnnnnnnnnnnnnnnnnnnnnnnnnnnnnnnnnnnnnnnnnnnnnnnnnnnnnnnnnnnnnnnnnnnnnnnnnnnnnnnnnnnnnnnnnnnnnnnnnnnnnnnnnnnnnnnnnnnnnnnnnnnnnnnnnnnnnnnnnnnnnnnnnnnnnnnnnnnnnnnnnnnnnnnnnnnnnnnnnnnnnnnnnnnnnnnnnnnnnnnnnnnnnnnnnnnnnnnnnnnnnnnnnnnnnnnnnnnnnnnnnnnnnnnnnnnnnnnnnnnnnnnnnnnnnnnnnnnnnnnnnnnnnnnnnnnnnnnnnnnnnnnnnnnnnnnnnnnnnnnnnnnnnnnnnnnnnnnnnnnnnnnnnnnnnnnnnnnnnnnnnnnnnnnnnnnnnnnnnnnnnnnnnnnnnnnnnnnnnnnnnnnnnnnnnnnnnnnnnnnnnnnnnnnnnnnnnnnnnnnnnnnnnnnnnnnnnnnnnnnnnnnnnnnnnnnnnnnnnnnnnnnnnnnnnnnnnnnnnnnnnnnnnnnnnnnnnnnnnnnnnnnnnnnnnnnnnnnnnnnnnnnnnnnnnnnnnnnnnnnnnnnnnnnnnnnnnnnnnnnnnnnnnnnnnnnnnnnnnnnnnnnnnnnnnnnnnnnnnnnnnnnnnnnnnnnnnnnnnnnnnnnnnnnnnnnnnnnnnnnnnnnnnnnnnnnnnnnnnnnnnnnnnnnnnnnnnnnnnnnnnnnnnnnnnnnnnnnnnnnnnnnnnnnnnnnnnnnnnnnnnnnnnnnnnnnnnnnnnnnnnnnnnnnnnnnnnnnnnnnnnnnnnnnnnnnnnnnnnnnnnnnnnnnnnnnnnnnnnnnnnnnnnnnnnnnnnnnnnnnnnnnnnnnnnnnnnnnnnnnnnnnnnnnnnnnnnnnnnnnnnnnnnnnnnnnnnnnnnnnnnnnnnnnnnnnnnnnnnnnnnnnnnnnnnnnnnnnnnnnnnnnnnnnnnnnnnnnnnnnnnnnnnnnnnnnnnnnnnnnnnnnnnnnnnnnnnnnnnnnnnnnnnnnnnnnnnnnnnnnnnnnnnnnnnnnnnnnnnnnnnnnnnnnnnnnnnnnnnnnnnnnnnnnnnnnnnnnnnnnnnnnnnnnnnnnnnnnnnnn

SEQ ID NO: 50 - RNA, 1575 nt, Artificial Sequence
  derived and/or modified CDS sequence (GC) from RAV__M13215.1__glycoprotein__RAV-G(GC)
auggugccccaggcccuccuguucgucccgcugcugguguucccccucugcuucggcaaguuccccaucuacaccauccccgacaagcuggggccguggagccccaucgacauccaccaccuguccugccccaacaaccucguggucgaggacgagggcugcaccaaccugagcggguucuccuacauggagcugaaggugggcuacaucagcgccaucaagaugaacggguucacgugcaccggcguggucaccgaggcggagaccuacacgaacuucgugggcuacgugaccaccaccuucaagcggaagcacuuccgccccacgccggacgccugccgggccgccuacaacuggaagauggccggggacccccgcuacgaggagucccuccacaaccccuaccccgacuaccacuggcugcggaccgucaagaccaccaaggagagccuggugaucaucuccccgagcguggcggaccucgaccccuacgaccgcucccugcacagccgggucuuccccggcgggaacugcuccggcguggccgugagcuccacguacugcagcaccaaccacgacuacaccaucuggaugcccgagaacccgcgccuggggauguccugcgacaucuucaccaacagccggggcaagcgcgccuccaagggcagcgagacgugcggguucgucgacgagcggggccucuacaagucccugaagggggccugcaagcugaagcucugcggcgugcugggccugcgccucauggacgggaccuggguggcgaugcagaccagcaacgagaccaaguggugcccccccggccagcuggucaaccugcacgacuuccggagcgacgagaucgagcaccucgugguggaggagcuggucaagaagcgcgaggagugccuggacgcccucgaguccaucaugacgaccaagagcguguccuuccggcgccugagccaccuccggaagcuggugcccggguucggcaaggccuacaccaucuucaacaagacccugauggaggccgacgcccacuacaaguccguccgcacguggaacgagaucaucccgagcaaggggugccugcgggugggcggccgcugccacccccacgucaacgggguguucuucaacggcaucauccucgggcccgacggcaacgugcugauccccgagaugcaguccagccugcuccagcagcacauggagcugcuggucuccagcgugaucccgcucaugcacccccuggcggaccccuccaccguguucaagaacggggacgaggccgaggacuucgucgaggugcaccuccccgacgugcacgagcggaucagcggcgucgaccugggccugccgaacugggggaaguacgugcugcucuccgccggcgcccugaccgcccugaugcugaucaucuuccucaugaccugcuggcgccgggugaaccggagcgagcccacgcagcacaaccugcgcgggaccggccgggaggucuccgugaccccgcagagcgggaagaucaucuccagcugggaguccuacaagagcggcggcgagaccgggcuguga

SEQ ID NO: 51 - RNA, 582 nt, Artificial Sequence
  derived and/or modified CDS sequence (GC)from Homo sapiens__NM_000799.2__erythropoietin__HsEPO(GC)
augggcgugcacgagugccccgccuggcuguggcuccugcugagccuccugucccugccgcucgggcugcccguccugggcgcccccccgcggcucaucugcgacagccgcgugcuggagcgguaccugcucgaggcgaaggaggccgagaacaucaccaccgggugcgccgagcacugcucccugaacgagaacaucacggugccggacaccaaggucaacuucuacgccuggaagcgcauggaggugggccagcaggccguggaggucuggcaggggcuggcgcuccugagcgaggccgugcugcggggccaggcccuccuggugaacuccagccagcccugggagccccugcagcuccacgucgacaaggccguguccggccugcgcagccugaccacccuccugcgggcgcugggggcccagaaggaggccaucucccccccggacgccgccagcgcggccccgcuccgcacgaucaccgccgacaccuuccggaagcuguuccgcguguacuccaacuuccugcggggcaagcucaagcuguacaccggggaggccugccgcacgggcgaccgguga

SEQ ID NO: 52 - RNA, 1653 nt, Artificial Sequence
  derived and/or modified CDS sequence (GC)from Photinus pyralis__U47122.2__luciferase__PpLuc(GC)
auggaggacgccaagaacaucaagaagggcccggcgcccuucuacccgcuggaggacgggaccgccggcgagcagcuccacaaggccaugaagcgguacgcccuggugccgggcacgaucgccuucaccgacgcccacaucgaggucgacaucaccuacgcggaguacuucgagaugagcgugcgccuggccgaggccaugaagcgguacggccugaacaccaaccaccggaucguggugugcucggagaacagccugcaguucuucaugccggugcugggcgcccucuucaucggcguggccgucgccccggcgaacgacaucuacaacgagcgggagcugcugaacagcauggggaucagccagccgaccgugguguucgugagcaagaagggccugcagaagauccugaacgugcagaagaagcugcccaucauccagaagaucaucaucauggacagcaagaccgacuaccagggcuuccagucgauguacacguucgugaccagccaccucccgccgggcuucaacgaguacgacuucgucccggagagcuucgaccgggacaagaccaucgcccugaucaugaacagcagcggcagcaccggccugccgaaggggguggcccugccgcaccggaccgccugcgugcgcuucucgcacgcccgggaccccaucuucggcaaccagaucaucccggacaccgccauccugagcguggugccguuccaccacggcuucggcauguucacgacccugggcuaccucaucugcggcuuccgggugguccugauguaccgguucgaggaggagcuguuccugcggagccugcaggacuacaagauccagagcgcgcugcucgugccgacccuguucagcuucuucgccaagagcacccugaucgacaaguacgaccugucgaaccugcacgagaucgccagcgggggcgccccgcugagcaaggaggugggcgaggccguggccaagcgguuccaccucccgggcauccgccagggcuacggccugaccgagaccacgagcgcgauccugaucacccccgagggggacgacaagccgggcgccgugggcaagguggucccguucuucgaggccaaggugguggaccuggacaccggcaagacccugggcgugaaccagcggggcgagcugugcgugcgggggccgaugaucaugagcggcuacgugaacaacccggaggccaccaacgcccucaucgacaaggacggcuggcugcacagcggcgacaucgccuacugggacgaggacgagcacuucuucaucgucgaccggcugaagucgcugaucaaguacaagggcuaccagguggcgccggccgagcuggagagcauccugcuccagcaccccaacaucuucgacgccggcguggccgggcugccggacgacgacgccggcgagcugccggccgcggugguggugcuggagcacggcaagaccaugacggagaaggagaucgucgacuacguggccagccaggugaccaccgccaagaagcugcggggcggcgugguguucguggacgaggucccgaagggccugaccgggaagcucgacgcccggaagauccgcgagauccugaucaaggccaagaagggcggcaagaucgccguguga

SEQ ID NO: 53 - RNA, 1662 nt, Artificial Sequence; identical to SEQ ID NO: 49
  derived and/or modified CDS sequence (GC)from protein of interest example 5
  misc_feature (1)..(1662): n is a, c, g, or u

SEQ ID NO: 54 - RNA, 1851 nt, Artificial Sequence
  mRNA product HSD17B4_RAV-G(GC)_PSMB3_A64-C30-histoneSL
gggagagucccgcagucggcguccagcggcucugcuuguucgugugugugucguugcaggccuuauucaagcuuaccauggugccccaggcccuccuguucgucccgcugcugguguucccccucugcuucggcaaguuccccaucuacaccauccccgacaagcuggggccguggagccccaucgacauccaccaccuguccugccccaacaaccucguggucgaggacgagggcugcaccaaccugagcggguucuccuacauggagcugaaggugggcuacaucagcgccaucaagaugaacggguucacgugcaccggcguggucaccgaggcggagaccuacacgaacuucgugggcuacgugaccaccaccuucaagcggaagcacuuccgccccacgccggacgccugccgggccgccuacaacuggaagauggccggggacccccgcuacgaggagucccuccacaaccccuaccccgacuaccacuggcugcggaccgucaagaccaccaaggagagccuggugaucaucuccccgagcguggcggaccucgaccccuacgaccgcucccugcacagccgggucuuccccggcgggaacugcuccggcguggccgugagcuccacguacugcagcaccaaccacgacuacaccaucuggaugcccgagaacccgcgccuggggauguccugcgacaucuucaccaacagccggggcaagcgcgccuccaagggcagcgagacgugcggguucgucgacgagcggggccucuacaagucccugaagggggccugcaagcugaagcucugcggcgugcugggccugcgccucauggacgggaccuggguggcgaugcagaccagcaacgagaccaaguggugcccccccggccagcuggucaaccugcacgacuuccggagcgacgagaucgagcaccucgugguggaggagcuggucaagaagcgcgaggagugccuggacgcccucgaguccaucaugacgaccaagagcguguccuuccggcgccugagccaccuccggaagcuggugcccggguucggcaaggccuacaccaucuucaacaagacccugauggaggccgacgcccacuacaaguccguccgcacguggaacgagaucaucccgagcaaggggugccugcgggugggcggccgcugccacccccacgucaacgggguguucuucaacggcaucauccucgggcccgacggcaacgugcugauccccgagaugcaguccagccugcuccagcagcacauggagcugcuggucuccagcgugaucccgcucaugcacccccuggcggaccccuccaccguguucaagaacggggacgaggccgaggacuucgucgaggugcaccuccccgacgugcacgagcggaucagcggcgucgaccugggccugccgaacugggggaaguacgugcugcucuccgccggcgcccugaccgcccugaugcugaucaucuuccucaugaccugcuggcgccgggugaaccggagcgagcccacgcagcacaaccugcgcgggaccggccgggaggucuccgugaccccgcagagcgggaagaucaucuccagcugggaguccuacaagagcggcggcgagaccgggcugugaggacuagucccuguucccagagcccacuuuuuuuucuuuuuuugaaauaaaauagccugucuuucagaucuaaaaaaaaaaaaaaaaaaaaaaaaaaaaaaaaaaaaaaaaaaaaaaaaaaaaaaaaaaaaaaaaugcaucccccccccccccccccccccccccccccccaaaggcucuuuucagagccaccagaauu

SEQ ID NO: 55 - RNA, 1792 nt, Artificial Sequence
  mRNA product HSD17B4_RAV-G(GC)_PSMB3_A64
gggagagucccgcagucggcguccagcggcucugcuuguucgugugugugucguugcaggccuuauucaagcuuaccauggugccccaggcccuccuguucgucccgcugcugguguucccccucugcuucggcaaguuccccaucuacaccauccccgacaagcuggggccguggagccccaucgacauccaccaccuguccugccccaacaaccucguggucgaggacgagggcugcaccaaccugagcggguucuccuacauggagcugaaggugggcuacaucagcgccaucaagaugaacggguucacgugcaccggcguggucaccgaggcggagaccuacacgaacuucgugggcuacgugaccaccaccuucaagcggaagcacuuccgccccacgccggacgccugccgggccgccuacaacuggaagauggccggggacccccgcuacgaggagucccuccacaaccccuaccccgacuaccacuggcugcggaccgucaagaccaccaaggagagccuggugaucaucuccccgagcguggcggaccucgaccccuacgaccgcucccugcacagccgggucuuccccggcgggaacugcuccggcguggccgugagcuccacguacugcagcaccaaccacgacuacaccaucuggaugcccgagaacccgcgccuggggauguccugcgacaucuucaccaacagccggggcaagcgcgccuccaagggcagcgagacgugcggguucgucgacgagcggggccucuacaagucccugaagggggccugcaagcugaagcucugcggcgugcugggccugcgccucauggacgggaccuggguggcgaugcagaccagcaacgagaccaaguggugcccccccggccagcuggucaaccugcacgacuuccggagcgacgagaucgagcaccucgugguggaggagcuggucaagaagcgcgaggagugccuggacgcccucgaguccaucaugacgaccaagagcguguccuuccggcgccugagccaccuccggaagcuggugcccggguucggcaaggccuacaccaucuucaacaagacccugauggaggccgacgcccacuacaaguccguccgcacguggaacgagaucaucccgagcaaggggugccugcgggugggcggccgcugccacccccacgucaacgggguguucuucaacggcaucauccucgggcccgacggcaacgugcugauccccgagaugcaguccagccugcuccagcagcacauggagcugcuggucuccagcgugaucccgcucaugcacccccuggcggaccccuccaccguguucaagaacggggacgaggccgaggacuucgucgaggugcaccuccccgacgugcacgagcggaucagcggcgucgaccugggccugccgaacugggggaaguacgugcugcucuccgccggcgcccugaccgcccugaugcugaucaucuuccucaugaccugcuggcgccgggugaaccggagcgagcccacgcagcacaaccugcgcgggaccggccgggaggucuccgugaccccgcagagcgggaagaucaucuccagcugggaguccuacaagagcggcggcgagaccgggcugugaggacuagucccuguucccagagcccacuuuuuuuucuuuuuuugaaauaaaauagccugucuuucagaucuaaaaaaaaaaaaaaaaaaaaaaaaaaaaaaaaaaaaaaaaaaaaaaaaaaaaaaaaaaaaaaaagaauu

SEQ ID NO: 56 - RNA, 858 nt, Artificial Sequence
  mRNA product HSD17B4_HsEPO(GC)_PSMB3_A64-C30-histoneSL
gggagagucccgcagucggcguccagcggcucugcuuguucgugugugugucguugcaggccuuauucaagcuuaccaugggcgugcacgagugccccgccuggcuguggcuccugcugagccuccugucccugccgcucgggcugcccguccugggcgcccccccgcggcucaucugcgacagccgcgugcuggagcgguaccugcucgaggcgaaggaggccgagaacaucaccaccgggugcgccgagcacugcucccugaacgagaacaucacggugccggacaccaaggucaacuucuacgccuggaagcgcauggaggugggccagcaggccguggaggucuggcaggggcuggcgcuccugagcgaggccgugcugcggggccaggcccuccuggugaacuccagccagcccugggagccccugcagcuccacgucgacaaggccguguccggccugcgcagccugaccacccuccugcgggcgcugggggcccagaaggaggccaucucccccccggacgccgccagcgcggccccgcuccgcacgaucaccgccgacaccuuccggaagcuguuccgcguguacuccaacuuccugcggggcaagcucaagcuguacaccggggaggccugccgcacgggcgaccggugaggacuagucccuguucccagagcccacuuuuuuuucuuuuuuugaaauaaaauagccugucuuucagaucuaaaaaaaaaaaaaaaaaaaaaaaaaaaaaaaaaaaaaaaaaaaaaaaaaaaaaaaaaaaaaaaaugcaucccccccccccccccccccccccccccccccaaaggcucuuuucagagccaccagaauu

SEQ ID NO: 57 - RNA, 799 nt, Artificial Sequence
  mRNA product HSD17B4_HsEPO(GC)_PSMB3_A64
gggagagucccgcagucggcguccagcggcucugcuuguucgugugugugucguugcaggccuuauucaagcuuaccaugggcgugcacgagugccccgccuggcuguggcuccugcugagccuccugucccugccgcucgggcugcccguccugggcgcccccccgcggcucaucugcgacagccgcgugcuggagcgguaccugcucgaggcgaaggaggccgagaacaucaccaccgggugcgccgagcacugcucccugaacgagaacaucacggugccggacaccaaggucaacuucuacgccuggaagcgcauggaggugggccagcaggccguggaggucuggcaggggcuggcgcuccugagcgaggccgugcugcggggccaggcccuccuggugaacuccagccagcccugggagccccugcagcuccacgucgacaaggccguguccggccugcgcagccugaccacccuccugcgggcgcugggggcccagaaggaggccaucucccccccggacgccgccagcgcggccccgcuccgcacgaucaccgccgacaccuuccggaagcuguuccgcguguacuccaacuuccugcggggcaagcucaagcuguacaccggggaggccugccgcacgggcgaccggugaggacuagucccuguucccagagcccacuuuuuuuucuuuuuuugaaauaaaauagccugucuuucagaucuaaaaaaaaaaaaaaaaaaaaaaaaaaaaaaaaaaaaaaaaaaaaaaaaaaaaaaaaaaaaaaaagaauu

SEQ ID NO: 58 - RNA, 1929 nt, Artificial Sequence
  mRNA product HSD17B4_PpLuc(GC)_PSMB3_A64-C30-histoneSL
gggagagucccgcagucggcguccagcggcucugcuuguucgugugugugucguugcaggccuuauucaagcuuaccauggaggacgccaagaacaucaagaagggcccggcgcccuucuacccgcuggaggacgggaccgccggcgagcagcuccacaaggccaugaagcgguacgcccuggugccgggcacgaucgccuucaccgacgcccacaucgaggucgacaucaccuacgcggaguacuucgagaugagcgugcgccuggccgaggccaugaagcgguacggccugaacaccaaccaccggaucguggugugcucggagaacagccugcaguucuucaugccggugcugggcgcccucuucaucggcguggccgucgccccggcgaacgacaucuacaacgagcgggagcugcugaacagcauggggaucagccagccgaccgugguguucgugagcaagaagggccugcagaagauccugaacgugcagaagaagcugcccaucauccagaagaucaucaucauggacagcaagaccgacuaccagggcuuccagucgauguacacguucgugaccagccaccucccgccgggcuucaacgaguacgacuucgucccggagagcuucgaccgggacaagaccaucgcccugaucaugaacagcagcggcagcaccggccugccgaaggggguggcccugccgcaccggaccgccugcgugcgcuucucgcacgcccgggaccccaucuucggcaaccagaucaucccggacaccgccauccugagcguggugccguuccaccacggcuucggcauguucacgacccugggcuaccucaucugcggcuuccgggugguccugauguaccgguucgaggaggagcuguuccugcggagccugcaggacuacaagauccagagcgcgcugcucgugccgacccuguucagcuucuucgccaagagcacccugaucgacaaguacgaccugucgaaccugcacgagaucgccagcgggggcgccccgcugagcaaggaggugggcgaggccguggccaagcgguuccaccucccgggcauccgccagggcuacggccugaccgagaccacgagcgcgauccugaucacccccgagggggacgacaagccgggcgccgugggcaagguggucccguucuucgaggccaaggugguggaccuggacaccggcaagacccugggcgugaaccagcggggcgagcugugcgugcgggggccgaugaucaugagcggcuacgugaacaacccggaggccaccaacgcccucaucgacaaggacggcuggcugcacagcggcgacaucgccuacugggacgaggacgagcacuucuucaucgucgaccggcugaagucgcugaucaaguacaagggcuaccagguggcgccggccgagcuggagagcauccugcuccagcaccccaacaucuucgacgccggcguggccgggcugccggacgacgacgccggcgagcugccggccgcggugguggugcuggagcacggcaagaccaugacggagaaggagaucgucgacuacguggccagccaggugaccaccgccaagaagcugcggggcggcgugguguucguggacgaggucccgaagggccugaccgggaagcucgacgcccggaagauccgcgagauccugaucaaggccaagaagggcggcaagaucgccgugugaggacuagucccuguucccagagcccacuuuuuuuucuuuuuuugaaauaaaauagccugucuuucagaucuaaaaaaaaaaaaaaaaaaaaaaaaaaaaaaaaaaaaaaaaaaaaaaaaaaaaaaaaaaaaaaaaugcaucccccccccccccccccccccccccccccccaaaggcucuuuucagagccaccagaauu

SEQ ID NO: 59 - RNA, 1870 nt, Artificial Sequence
  mRNA product HSD17B4_PpLuc(GC)_PSMB3_A64
gggagagucccgcagucggcguccagcggcucugcuuguucgugugugugucguugcaggccuuauucaagcuuaccauggaggacgccaagaacaucaagaagggcccggcgcccuucuacccgcuggaggacgggaccgccggcgagcagcuccacaaggccaugaagcgguacgcccuggugccgggcacgaucgccuucaccgacgcccacaucgaggucgacaucaccuacgcggaguacuucgagaugagcgugcgccuggccgaggccaugaagcgguacggccugaacaccaaccaccggaucguggugugcucggagaacagccugcaguucuucaugccggugcugggcgcccucuucaucggcguggccgucgccccggcgaacgacaucuacaacgagcgggagcugcugaacagcauggggaucagccagccgaccgugguguucgugagcaagaagggccugcagaagauccugaacgugcagaagaagcugcccaucauccagaagaucaucaucauggacagcaagaccgacuaccagggcuuccagucgauguacacguucgugaccagccaccucccgccgggcuucaacgaguacgacuucgucccggagagcuucgaccgggacaagaccaucgcccugaucaugaacagcagcggcagcaccggccugccgaaggggguggcccugccgcaccggaccgccugcgugcgcuucucgcacgcccgggaccccaucuucggcaaccagaucaucccggacaccgccauccugagcguggugccguuccaccacggcuucggcauguucacgacccugggcuaccucaucugcggcuuccgggugguccugauguaccgguucgaggaggagcuguuccugcggagccugcaggacuacaagauccagagcgcgcugcucgugccgacccuguucagcuucuucgccaagagcacccugaucgacaaguacgaccugucgaaccugcacgagaucgccagcgggggcgccccgcugagcaaggaggugggcgaggccguggccaagcgguuccaccucccgggcauccgccagggcuacggccugaccgagaccacgagcgcgauccugaucacccccgagggggacgacaagccgggcgccgugggcaagguggucccguucuucgaggccaaggugguggaccuggacaccggcaagacccugggcgugaaccagcggggcgagcugugcgugcgggggccgaugaucaugagcggcuacgugaacaacccggaggccaccaacgcccucaucgacaaggacggcuggcugcacagcggcgacaucgccuacugggacgaggacgagcacuucuucaucgucgaccggcugaagucgcugaucaaguacaagggcuaccagguggcgccggccgagcuggagagcauccugcuccagcaccccaacaucuucgacgccggcguggccgggcugccggacgacgacgccggcgagcugccggccgcggugguggugcuggagcacggcaagaccaugacggagaaggagaucgucgacuacguggccagccaggugaccaccgccaagaagcugcggggcggcgugguguucguggacgaggucccgaagggccugaccgggaagcucgacgcccggaagauccgcgagauccugaucaaggccaagaagggcggcaagaucgccgugugaggacuagucccuguucccagagcccacuuuuuuuucuuuuuuugaaauaaaauagccugucuuucagaucuaaaaaaaaaaaaaaaaaaaaaaaaaaaaaaaaaaaaaaaaaaaaaaaaaaaaaaaaaaaaaaaagaauu

SEQ ID NO: 60 - RNA, 1938 nt, Artificial Sequence
  mRNA product HSD17B4_protein of interest example 5_PSMB3_A64-C30-histoneSL
  misc_feature (78)..(1739): n is a, c, g, or u
gggagagucccgcagucggcguccagcggcucugcuuguucgugugugugucguugcaggccuuauucaagcuuaccnnnnnnnnnnnnnnnnnnnnnnnnnnnnnnnnnnnnnnnnnnnnnnnnnnnnnnnnnnnnnnnnnnnnnnnnnnnnnnnnnnnnnnnnnnnnnnnnnnnnnnnnnnnnnnnnnnnnnnnnnnnnnnnnnnnnnnnnnnnnnnnnnnnnnnnnnnnnnnnnnnnnnnnnnnnnnnnnnnnnnnnnnnnnnnnnnnnnnnnnnnnnnnnnnnnnnnnnnnnnnnnnnnnnnnnnnnnnnnnnnnnnnnnnnnnnnnnnnnnnnnnnnnnnnnnnnnnnnnnnnnnnnnnnnnnnnnnnnnnnnnnnnnnnnnnnnnnnnnnnnnnnnnnnnnnnnnnnnnnnnnnnnnnnnnnnnnnnnnnnnnnnnnnnnnnnnnnnnnnnnnnnnnnnnnnnnnnnnnnnnnnnnnnnnnnnnnnnnnnnnnnnnnnnnnnnnnnnnnnnnnnnnnnnnnnnnnnnnnnnnnnnnnnnnnnnnnnnnnnnnnnnnnnnnnnnnnnnnnnnnnnnnnnnnnnnnnnnnnnnnnnnnnnnnnnnnnnnnnnnnnnnnnnnnnnnnnnnnnnnnnnnnnnnnnnnnnnnnnnnnnnnnnnnnnnnnnnnnnnnnnnnnnnnnnnnnnnnnnnnnnnnnnnnnnnnnnnnnnnnnnnnnnnnnnnnnnnnnnnnnnnnnnnnnnnnnnnnnnnnnnnnnnnnnnnnnnnnnnnnnnnnnnnnnnnnnnnnnnnnnnnnnnnnnnnnnnnnnnnnnnnnnnnnnnnnnnnnnnnnnnnnnnnnnnnnnnnnnnnnnnnnnnnnnnnnnnnnnnnnnnnnnnnnnnnnnnnnnnnnnnnnnnnnnnnnnnnnnnnnnnnnnnnnnnnnnnnnnnnnnnnnnnnnnnnnnnnnnnnnnnnnnnnnnnnnnnnnnnnnnnnnnnnnnnnnnnnnnnnnnnnnnnnnnnnnnnnnnnnnnnnnnnnnnnnnnnnnnnnnnnnnnnnnnnnnnnnnnnnnnnnnnnnnnnnnnnnnnnnnnnnnnnnnnnnnnnnnnnnnnnnnnnnnnnnnnnnnnnnnnnnnnnnnnnnnnnnnnnnnnnnnnnnnnnnnnnnnnnnnnnnnnnnnnnnnnnnnnnnnnnnnnnnnnnnnnnnnnnnnnnnnnnnnnnnnnnnnnnnnnnnnnnnnnnnnnnnnnnnnnnnnnnnnnnnnnnnnnnnnnnnnnnnnnnnnnnnnnnnnnnnnnnnnnnnnnnnnnnnnnnnnnnnnnnnnnnnnnnnnnnnnnnnnnnnnnnnnnnnnnnnnnnnnnnnnnnnnnnnnnnnnnnnnnnnnnnnnnnnnnnnnnnnnnnnnnnnnnnnnnnnnnnnnnnnnnnnnnnnnnnnnnnnnnnnnnnnnnnnnnnnnnnnnnnnnnnnnnnnnnnnnnnnnnnnnnnnnnnnnnnnnnnnnnnnnnnnnnnnnnnnnnnnnnnnnnnnnnnnnnnnnnnnnnnnnnnnnnnnnnnnnnnnnnnnnnnnnnnnnnnnnnnnnnnnnnnnnnnnnnnnnnnnnnnnnnnnnnnnnnnnnnnnnnnnnnnnnnnnnnnnnnnnnnnnnnnnnnnnnnnnnnnnnnnnnnnnnnnnnnnnnnnnnnnnnnnnnnnnnnnnnnnnnnnnnnnnnnnnnnnnnnnnnnnnnnnnnnnnnnnnnnnnnnnnnnnnnnnnnnnggacuagucccuguucccagagcccacuuuuuuuucuuuuuuugaaauaaaauagccugucuuucagaucuaaaaaaaaaaaaaaaaaaaaaaaaaaaaaaaaaaaaaaaaaaaaaaaaaaaaaaaaaaaaaaaaugcaucccccccccccccccccccccccccccccccaaaggcucuuuucagagccaccagaauu

SEQ ID NO: 61 - RNA, 1915 nt, Artificial Sequence
  mRNA product HSD17B4_RAV-G(GC)_CASP1_A64-C30-histoneSL
gggagagucccgcagucggcguccagcggcucugcuuguucgugugugugucguugcaggccuuauucaagcuuaccauggugccccaggcccuccuguucgucccgcugcugguguucccccucugcuucggcaaguuccccaucuacaccauccccgacaagcuggggccguggagccccaucgacauccaccaccuguccugccccaacaaccucguggucgaggacgagggcugcaccaaccugagcggguucuccuacauggagcugaaggugggcuacaucagcgccaucaagaugaacggguucacgugcaccggcguggucaccgaggcggagaccuacacgaacuucgugggcuacgugaccaccaccuucaagcggaagcacuuccgccccacgccggacgccugccgggccgccuacaacuggaagauggccggggacccccgcuacgaggagucccuccacaaccccuaccccgacuaccacuggcugcggaccgucaagaccaccaaggagagccuggugaucaucuccccgagcguggcggaccucgaccccuacgaccgcucccugcacagccgggucuuccccggcgggaacugcuccggcguggccgugagcuccacguacugcagcaccaaccacgacuacaccaucuggaugcccgagaacccgcgccuggggauguccugcgacaucuucaccaacagccggggcaagcgcgccuccaagggcagcgagacgugcggguucgucgacgagcggggccucuacaagucccugaagggggccugcaagcugaagcucugcggcgugcugggccugcgccucauggacgggaccuggguggcgaugcagaccagcaacgagaccaaguggugcccccccggccagcuggucaaccugcacgacuuccggagcgacgagaucgagcaccucgugguggaggagcuggucaagaagcgcgaggagugccuggacgcccucgaguccaucaugacgaccaagagcguguccuuccggcgccugagccaccuccggaagcuggugcccggguucggcaaggccuacaccaucuucaacaagacccugauggaggccgacgcccacuacaaguccguccgcacguggaacgagaucaucccgagcaaggggugccugcgggugggcggccgcugccacccccacgucaacgggguguucuucaacggcaucauccucgggcccgacggcaacgugcugauccccgagaugcaguccagccugcuccagcagcacauggagcugcuggucuccagcgugaucccgcucaugcacccccuggcggaccccuccaccguguucaagaacggggacgaggccgaggacuucgucgaggugcaccuccccgacgugcacgagcggaucagcggcgucgaccugggccugccgaacugggggaaguacgugcugcucuccgccggcgcccugaccgcccugaugcugaucaucuuccucaugaccugcuggcgccgggugaaccggagcgagcccacgcagcacaaccugcgcgggaccggccgggaggucuccgugaccccgcagagcgggaagaucaucuccagcugggaguccuacaagagcggcggcgagaccgggcugugaggacuaguaauaaggaaacuguaugaaugucugugggcaggaagugaagagauccuucuguaaagguuuuuggaauuaugucugcugaauaauaaacuuuuuugaaauaauaaaucugguagaaaaaugagaucuaaaaaaaaaaaaaaaaaaaaaaaaaaaaaaaaaaaaaaaaaaaaaaaaaaaaaaaaaaaaaaaaugcaucccccccccccccccccccccccccccccccaaaggcucuuuucagagccaccagaauu

SEQ ID NO: 62 - RNA, 1856 nt, Artificial Sequence
  mRNA product HSD17B4_RAV-G(GC)_CASP1_A64
gggagagucccgcagucggcguccagcggcucugcuuguucgugugugugucguugcaggccuuauucaagcuuaccauggugccccaggcccuccuguucgucccgcugcugguguucccccucugcuucggcaaguuccccaucuacaccauccccgacaagcuggggccguggagccccaucgacauccaccaccuguccugccccaacaaccucguggucgaggacgagggcugcaccaaccugagcggguucuccuacauggagcugaaggugggcuacaucagcgccaucaagaugaacggguucacgugcaccggcguggucaccgaggcggagaccuacacgaacuucgugggcuacgugaccaccaccuucaagcggaagcacuuccgccccacgccggacgccugccgggccgccuacaacuggaagauggccggggacccccgcuacgaggagucccuccacaaccccuaccccgacuaccacuggcugcggaccgucaagaccaccaaggagagccuggugaucaucuccccgagcguggcggaccucgaccccuacgaccgcucccugcacagccgggucuuccccggcgggaacugcuccggcguggccgugagcuccacguacugcagcaccaaccacgacuacaccaucuggaugcccgagaacccgcgccuggggauguccugcgacaucuucaccaacagccggggcaagcgcgccuccaagggcagcgagacgugcggguucgucgacgagcggggccucuacaagucccugaagggggccugcaagcugaagcucugcggcgugcugggccugcgccucauggacgggaccuggguggcgaugcagaccagcaacgagaccaaguggugcccccccggccagcuggucaaccugcacgacuuccggagcgacgagaucgagcaccucgugguggaggagcuggucaagaagcgcgaggagugccuggacgcccucgaguccaucaugacgaccaagagcguguccuuccggcgccugagccaccuccggaagcuggugcccggguucggcaaggccuacaccaucuucaacaagacccugauggaggccgacgcccacuacaaguccguccgcacguggaacgagaucaucccgagcaaggggugccugcgggugggcggccgcugccacccccacgucaacgggguguucuucaacggcaucauccucgggcccgacggcaacgugcugauccccgagaugcaguccagccugcuccagcagcacauggagcugcuggucuccagcgugaucccgcucaugcacccccuggcggaccccuccaccguguucaagaacggggacgaggccgaggacuucgucgaggugcaccuccccgacgugcacgagcggaucagcggcgucgaccugggccugccgaacugggggaaguacgugcugcucuccgccggcgcccugaccgcccugaugcugaucaucuuccucaugaccugcuggcgccgggugaaccggagcgagcccacgcagcacaaccugcgcgggaccggccgggaggucuccgugaccccgcagagcgggaagaucaucuccagcugggaguccuacaagagcggcggcgagaccgggcugugaggacuaguaauaaggaaacuguaugaaugucugugggcaggaagugaagagauccuucuguaaagguuuuuggaauuaugucugcugaauaauaaacuuuuuugaaauaauaaaucugguagaaaaaugagaucuaaaaaaaaaaaaaaaaaaaaaaaaaaaaaaaaaaaaaaaaaaaaaaaaaaaaaaaaaaaaaaaagaauu

SEQ ID NO: 63 - RNA, 922 nt, Artificial Sequence
  mRNA product HSD17B4_HsEPO(GC)_CASP1_A64-C30-histoneSL
gggagagucccgcagucggcguccagcggcucugcuuguucgugugugugucguugcaggccuuauucaagcuuaccaugggcgugcacgagugccccgccuggcuguggcuccugcugagccuccugucccugccgcucgggcugcccguccugggcgcccccccgcggcucaucugcgacagccgcgugcuggagcgguaccugcucgaggcgaaggaggccgagaacaucaccaccgggugcgccgagcacugcucccugaacgagaacaucacggugccggacaccaaggucaacuucuacgccuggaagcgcauggaggugggccagcaggccguggaggucuggcaggggcuggcgcuccugagcgaggccgugcugcggggccaggcccuccuggugaacuccagccagcccugggagccccugcagcuccacgucgacaaggccguguccggccugcgcagccugaccacccuccugcgggcgcugggggcccagaaggaggccaucucccccccggacgccgccagcgcggccccgcuccgcacgaucaccgccgacaccuuccggaagcuguuccgcguguacuccaacuuccugcggggcaagcucaagcuguacaccggggaggccugccgcacgggcgaccggugaggacuaguaauaaggaaacuguaugaaugucugugggcaggaagugaagagauccuucuguaaagguuuuuggaauuaugucugcugaauaauaaacuuuuuugaaauaauaaaucugguagaaaaaugagaucuaaaaaaaaaaaaaaaaaaaaaaaaaaaaaaaaaaaaaaaaaaaaaaaaaaaaaaaaaaaaaaaaugcaucccccccccccccccccccccccccccccccaaaggcucuuuucagagccaccagaauu

SEQ ID NO: 64 - RNA, 863 nt, Artificial Sequence
  mRNA product HSD17B4_HsEPO(GC)_CASP1_A64
gggagagucccgcagucggcguccagcggcucugcuuguucgugugugugucguugcaggccuuauucaagcuuaccaugggcgugcacgagugccccgccuggcuguggcuccugcugagccuccugucccugccgcucgggcugcccguccugggcgcccccccgcggcucaucugcgacagccgcgugcuggagcgguaccugcucgaggcgaaggaggccgagaacaucaccaccgggugcgccgagcacugcucccugaacgagaacaucacggugccggacaccaaggucaacuucuacgccuggaagcgcauggaggugggccagcaggccguggaggucuggcaggggcuggcgcuccugagcgaggccgugcugcggggccaggcccuccuggugaacuccagccagcccugggagccccugcagcuccacgucgacaaggccguguccggccugcgcagccugaccacccuccugcgggcgcugggggcccagaaggaggccaucucccccccggacgccgccagcgcggccccgcuccgcacgaucaccgccgacaccuuccggaagcuguuccgcguguacuccaacuuccugcggggcaagcucaagcuguacaccggggaggccugccgcacgggcgaccggugaggacuaguaauaaggaaacuguaugaaugucugugggcaggaagugaagagauccuucuguaaagguuuuuggaauuaugucugcugaauaauaaacuuuuuugaaauaauaaaucugguagaaaaaugagaucuaaaaaaaaaaaaaaaaaaaaaaaaaaaaaaaaaaaaaaaaaaaaaaaaaaaaaaaaaaaaaaaagaauu

SEQ ID NO: 65 - RNA, 1993 nt, Artificial Sequence
  mRNA product HSD17B4_PpLuc(GC)_CASP1_A64-C30-histoneSL
gggagagucccgcagucggcguccagcggcucugcuuguucgugugugugucguugcaggccuuauucaagcuuaccauggaggacgccaagaacaucaagaagggcccggcgcccuucuacccgcuggaggacgggaccgccggcgagcagcuccacaaggccaugaagcgguacgcccuggugccgggcacgaucgccuucaccgacgcccacaucgaggucgacaucaccuacgcggaguacuucgagaugagcgugcgccuggccgaggccaugaagcgguacggccugaacaccaaccaccggaucguggugugcucggagaacagccugcaguucuucaugccggugcugggcgcccucuucaucggcguggccgucgccccggcgaacgacaucuacaacgagcgggagcugcugaacagcauggggaucagccagccgaccgugguguucgugagcaagaagggccugcagaagauccugaacgugcagaagaagcugcccaucauccagaagaucaucaucauggacagcaagaccgacuaccagggcuuccagucgauguacacguucgugaccagccaccucccgccgggcuucaacgaguacgacuucgucccggagagcuucgaccgggacaagaccaucgcccugaucaugaacagcagcggcagcaccggccugccgaaggggguggcccugccgcaccggaccgccugcgugcgcuucucgcacgcccgggaccccaucuucggcaaccagaucaucccggacaccgccauccugagcguggugccguuccaccacggcuucggcauguucacgacccugggcuaccucaucugcggcuuccgggugguccugauguaccgguucgaggaggagcuguuccugcggagccugcaggacuacaagauccagagcgcgcugcucgugccgacccuguucagcuucuucgccaagagcacccugaucgacaaguacgaccugucgaaccugcacgagaucgccagcgggggcgccccgcugagcaaggaggugggcgaggccguggccaagcgguuccaccucccgggcauccgccagggcuacggccugaccgagaccacgagcgcgauccugaucacccccgagggggacgacaagccgggcgccgugggcaagguggucccguucuucgaggccaaggugguggaccuggacaccggcaagacccugggcgugaaccagcggggcgagcugugcgugcgggggccgaugaucaugagcggcuacgugaacaacccggaggccaccaacgcccucaucgacaaggacggcuggcugcacagcggcgacaucgccuacugggacgaggacgagcacuucuucaucgucgaccggcugaagucgcugaucaaguacaagggcuaccagguggcgccggccgagcuggagagcauccugcuccagcaccccaacaucuucgacgccggcguggccgggcugccggacgacgacgccggcgagcugccggccgcggugguggugcuggagcacggcaagaccaugacggagaaggagaucgucgacuacguggccagccaggugaccaccgccaagaagcugcggggcggcgugguguucguggacgaggucccgaagggccugaccgggaagcucgacgcccggaagauccgcgagauccugaucaaggccaagaagggcggcaagaucgccgugugaggacuaguaauaaggaaacuguaugaaugucugugggcaggaagugaagagauccuucuguaaagguuuuuggaauuaugucugcugaauaauaaacuuuuuugaaauaauaaaucugguagaaaaaugagaucuaaaaaaaaaaaaaaaaaaaaaaaaaaaaaaaaaaaaaaaaaaaaaaaaaaaaaaaaaaaaaaaaugcaucccccccccccccccccccccccccccccccaaaggcucuuuucagagccaccagaauu

SEQ ID NO: 66 - RNA, 1934 nt, Artificial Sequence
  mRNA product HSD17B4_PpLuc(GC)_CASP1_A64
gggagagucccgcagucggcguccagcggcucugcuuguucgugugugugucguugcaggccuuauucaagcuuaccauggaggacgccaagaacaucaagaagggcccggcgcccuucuacccgcuggaggacgggaccgccggcgagcagcuccacaaggccaugaagcgguacgcccuggugccgggcacgaucgccuucaccgacgcccacaucgaggucgacaucaccuacgcggaguacuucgagaugagcgugcgccuggccgaggccaugaagcgguacggccugaacaccaaccaccggaucguggugugcucggagaacagccugcaguucuucaugccggugcugggcgcccucuucaucggcguggccgucgccccggcgaacgacaucuacaacgagcgggagcugcugaacagcauggggaucagccagccgaccgugguguucgugagcaagaagggccugcagaagauccugaacgugcagaagaagcugcccaucauccagaagaucaucaucauggacagcaagaccgacuaccagggcuuccagucgauguacacguucgugaccagccaccucccgccgggcuucaacgaguacgacuucgucccggagagcuucgaccgggacaagaccaucgcccugaucaugaacagcagcggcagcaccggccugccgaaggggguggcccugccgcaccggaccgccugcgugcgcuucucgcacgcccgggaccccaucuucggcaaccagaucaucccggacaccgccauccugagcguggugccguuccaccacggcuucggcauguucacgacccugggcuaccucaucugcggcuuccgggugguccugauguaccgguucgaggaggagcuguuccugcggagccugcaggacuacaagauccagagcgcgcugcucgugccgacccuguucagcuucuucgccaagagcacccugaucgacaaguacgaccugucgaaccugcacgagaucgccagcgggggcgccccgcugagcaaggaggugggcgaggccguggccaagcgguuccaccucccgggcauccgccagggcuacggccugaccgagaccacgagcgcgauccugaucacccccgagggggacgacaagccgggcgccgugggcaagguggucccguucuucgaggccaaggugguggaccuggacaccggcaagacccugggcgugaaccagcggggcgagcugugcgugcgggggccgaugaucaugagcggcuacgugaacaacccggaggccaccaacgcccucaucgacaaggacggcuggcugcacagcggcgacaucgccuacugggacgaggacgagcacuucuucaucgucgaccggcugaagucgcugaucaaguacaagggcuaccagguggcgccggccgagcuggagagcauccugcuccagcaccccaacaucuucgacgccggcguggccgggcugccggacgacgacgccggcgagcugccggccgcggugguggugcuggagcacggcaagaccaugacggagaaggagaucgucgacuacguggccagccaggugaccaccgccaagaagcugcggggcggcgugguguucguggacgaggucccgaagggccugaccgggaagcucgacgcccggaagauccgcgagauccugaucaaggccaagaagggcggcaagaucgccgugugaggacuaguaauaaggaaacuguaugaaugucugugggcaggaagugaagagauccuucuguaaagguuuuuggaauuaugucugcugaauaauaaacuuuuuugaaauaauaaaucugguagaaaaaugagaucuaaaaaaaaaaaaaaaaaaaaaaaaaaaaaaaaaaaaaaaaaaaaaaaaaaaaaaaaaaaaaaaagaauu

SEQ ID NO: 67 - RNA, 2002 nt, Artificial Sequence
  mRNA product HSD17B4_protein of interest example 5_CASP1_A64-C30-histoneSL
  misc_feature (78)..(1739): n is a, c, g, or u
gggagagucccgcagucggcguccagcggcucugcuuguucgugugugugucguugcaggccuuauucaagcuuaccnnnnnnnnnnnnnnnnnnnnnnnnnnnnnnnnnnnnnnnnnnnnnnnnnnnnnnnnnnnnnnnnnnnnnnnnnnnnnnnnnnnnnnnnnnnnnnnnnnnnnnnnnnnnnnnnnnnnnnnnnnnnnnnnnnnnnnnnnnnnnnnnnnnnnnnnnnnnnnnnnnnnnnnnnnnnnnnnnnnnnnnnnnnnnnnnnnnnnnnnnnnnnnnnnnnnnnnnnnnnnnnnnnnnnnnnnnnnnnnnnnnnnnnnnnnnnnnnnnnnnnnnnnnnnnnnnnnnnnnnnnnnnnnnnnnnnnnnnnnnnnnnnnnnnnnnnnnnnnnnnnnnnnnnnnnnnnnnnnnnnnnnnnnnnnnnnnnnnnnnnnnnnnnnnnnnnnnnnnnnnnnnnnnnnnnnnnnnnnnnnnnnnnnnnnnnnnnnnnnnnnnnnnnnnnnnnnnnnnnnnnnnnnnnnnnnnnnnnnnnnnnnnnnnnnnnnnnnnnnnnnnnnnnnnnnnnnnnnnnnnnnnnnnnnnnnnnnnnnnnnnnnnnnnnnnnnnnnnnnnnnnnnnnnnnnnnnnnnnnnnnnnnnnnnnnnnnnnnnnnnnnnnnnnnnnnnnnnnnnnnnnnnnnnnnnnnnnnnnnnnnnnnnnnnnnnnnnnnnnnnnnnnnnnnnnnnnnnnnnnnnnnnnnnnnnnnnnnnnnnnnnnnnnnnnnnnnnnnnnnnnnnnnnnnnnnnnnnnnnnnnnnnnnnnnnnnnnnnnnnnnnnnnnnnnnnnnnnnnnnnnnnnnnnnnnnnnnnnnnnnnnnnnnnnnnnnnnnnnnnnnnnnnnnnnnnnnnnnnnnnnnnnnnnnnnnnnnnnnnnnnnnnnnnnnnnnnnnnnnnnnnnnnnnnnnnnnnnnnnnnnnnnnnnnnnnnnnnnnnnnnnnnnnnnnnnnnnnnnnnnnnnnnnnnnnnnnnnnnnnnnnnnnnnnnnnnnnnnnnnnnnnnnnnnnnnnnnnnnnnnnnnnnnnnnnnnnnnnnnnnnnnnnnnnnnnnnnnnnnnnnnnnnnnnnnnnnnnnnnnnnnnnnnnnnnnnnnnnnnnnnnnnnnnnnnnnnnnnnnnnnnnnnnnnnnnnnnnnnnnnnnnnnnnnnnnnnnnnnnnnnnnnnnnnnnnnnnnnnnnnnnnnnnnnnnnnnnnnnnnnnnnnnnnnnnnnnnnnnnnnnnnnnnnnnnnnnnnnnnnnnnnnnnnnnnnnnnnnnnnnnnnnnnnnnnnnnnnnnnnnnnnnnnnnnnnnnnnnnnnnnnnnnnnnnnnnnnnnnnnnnnnnnnnnnnnnnnnnnnnnnnnnnnnnnnnnnnnnnnnnnnnnnnnnnnnnnnnnnnnnnnnnnnnnnnnnnnnnnnnnnnnnnnnnnnnnnnnnnnnnnnnnnnnnnnnnnnnnnnnnnnnnnnnnnnnnnnnnnnnnnnnnnnnnnnnnnnnnnnnnnnnnnnnnnnnnnnnnnnnnnnnnnnnnnnnnnnnnnnnnnnnnnnnnnnnnnnnnnnnnnnnnnnnnnnnnnnnnnnnnnnnnnnnnnnnnnnnnnnnnnnnnnnnnnnnnnnnnnnnnnnnnnnnnnnnnnnnnnnnnnnnnnnnnnnnnnnnnnnnnnnnnnnnnnnnnnnnnnnnnnnnnnnnnnnnnnnnnnnnnnnnnnnnnnnnnnnnnnnnnnggacuaguaauaaggaaacuguaugaaugucugugggcaggaagugaagagauccuucuguaaagguuuuuggaauuaugucugcugaauaauaaacuuuuuugaaauaauaaaucugguagaaaaaugagaucuaaaaaaaaaaaaaaaaaaaaaaaaaaaaaaaaaaaaaaaaaaaaaaaaaaaaaaaaaaaaaaaaugcaucccccccccccccccccccccccccccccccaaaggcucuuuucagagccaccagaauu

SEQ ID NO: 68 - RNA, 1931 nt, Artificial Sequence
  mRNA product HSD17B4_RAV-G(GC)_COX6B1_A64-C30-histoneSL
gggagagucccgcagucggcguccagcggcucugcuuguucgugugugugucguugcaggccuuauucaagcuuaccauggugccccaggcccuccuguucgucccgcugcugguguucccccucugcuucggcaaguuccccaucuacaccauccccgacaagcuggggccguggagccccaucgacauccaccaccuguccugccccaacaaccucguggucgaggacgagggcugcaccaaccugagcggguucuccuacauggagcugaaggugggcuacaucagcgccaucaagaugaacggguucacgugcaccggcguggucaccgaggcggagaccuacacgaacuucgugggcuacgugaccaccaccuucaagcggaagcacuuccgccccacgccggacgccugccgggccgccuacaacuggaagauggccggggacccccgcuacgaggagucccuccacaaccccuaccccgacuaccacuggcugcggaccgucaagaccaccaaggagagccuggugaucaucuccccgagcguggcggaccucgaccccuacgaccgcucccugcacagccgggucuuccccggcgggaacugcuccggcguggccgugagcuccacguacugcagcaccaaccacgacuacaccaucuggaugcccgagaacccgcgccuggggauguccugcgacaucuucaccaacagccggggcaagcgcgccuccaagggcagcgagacgugcggguucgucgacgagcggggccucuacaagucccugaagggggccugcaagcugaagcucugcggcgugcugggccugcgccucauggacgggaccuggguggcgaugcagaccagcaacgagaccaaguggugcccccccggccagcuggucaaccugcacgacuuccggagcgacgagaucgagcaccucgugguggaggagcuggucaagaagcgcgaggagugccuggacgcccucgaguccaucaugacgaccaagagcguguccuuccggcgccugagccaccuccggaagcuggugcccggguucggcaaggccuacaccaucuucaacaagacccugauggaggccgacgcccacuacaaguccguccgcacguggaacgagaucaucccgagcaaggggugccugcgggugggcggccgcugccacccccacgucaacgggguguucuucaacggcaucauccucgggcccgacggcaacgugcugauccccgagaugcaguccagccugcuccagcagcacauggagcugcuggucuccagcgugaucccgcucaugcacccccuggcggaccccuccaccguguucaagaacggggacgaggccgaggacuucgucgaggugcaccuccccgacgugcacgagcggaucagcggcgucgaccugggccugccgaacugggggaaguacgugcugcucuccgccggcgcccugaccgcccugaugcugaucaucuuccucaugaccugcuggcgccgggugaaccggagcgagcccacgcagcacaaccugcgcgggaccggccgggaggucuccgugaccccgcagagcgggaagaucaucuccagcugggaguccuacaagagcggcggcgagaccgggcugugaggacuaguacuggcugcaucucccuuuccucuguccuccauccuucucccaggauggugaagggggaccugguacccagugauccccaccccaggauccuaaaucaugacuuaccugcuaauaaaaacucauuggaaaagugagaagaucuaaaaaaaaaaaaaaaaaaaaaaaaaaaaaaaaaaaaaaaaaaaaaaaaaaaaaaaaaaaaaaaaugcaucccccccccccccccccccccccccccccccaaaggcucuuuucagagccaccagaauu

SEQ ID NO: 69 - RNA, 1872 nt, Artificial Sequence
  mRNA product HSD17B4_RAV-G(GC)_COX6B1_A64
gggagagucccgcagucggcguccagcggcucugcuuguucgugugugugucguugcaggccuuauucaagcuuaccauggugccccaggcccuccuguucgucccgcugcugguguucccccucugcuucggcaaguuccccaucuacaccauccccgacaagcuggggccguggagccccaucgacauccaccaccuguccugccccaacaaccucguggucgaggacgagggcugcaccaaccugagcggguucuccuacauggagcugaaggugggcuacaucagcgccaucaagaugaacggguucacgugcaccggcguggucaccgaggcggagaccuacacgaacuucgugggcuacgugaccaccaccuucaagcggaagcacuuccgccccacgccggacgccugccgggccgccuacaacuggaagauggccggggacccccgcuacgaggagucccuccacaaccccuaccccgacuaccacuggcugcggaccgucaagaccaccaaggagagccuggugaucaucuccccgagcguggcggaccucgaccccuacgaccgcucccugcacagccgggucuuccccggcgggaacugcuccggcguggccgugagcuccacguacugcagcaccaaccacgacuacaccaucuggaugcccgagaacccgcgccuggggauguccugcgacaucuucaccaacagccggggcaagcgcgccuccaagggcagcgagacgugcggguucgucgacgagcggggccucuacaagucccugaagggggccugcaagcugaagcucugcggcgugcugggccugcgccucauggacgggaccuggguggcgaugcagaccagcaacgagaccaaguggugcccccccggccagcuggucaaccugcacgacuuccggagcgacgagaucgagcaccucgugguggaggagcuggucaagaagcgcgaggagugccuggacgcccucgaguccaucaugacgaccaagagcguguccuuccggcgccugagccaccuccggaagcuggugcccggguucggcaaggccuacaccaucuucaacaagacccugauggaggccgacgcccacuacaaguccguccgcacguggaacgagaucaucccgagcaaggggugccugcgggugggcggccgcugccacccccacgucaacgggguguucuucaacggcaucauccucgggcccgacggcaacgugcugauccccgagaugcaguccagccugcuccagcagcacauggagcugcuggucuccagcgugaucccgcucaugcacccccuggcggaccccuccaccguguucaagaacggggacgaggccgaggacuucgucgaggugcaccuccccgacgugcacgagcggaucagcggcgucgaccugggccugccgaacugggggaaguacgugcugcucuccgccggcgcccugaccgcccugaugcugaucaucuuccucaugaccugcuggcgccgggugaaccggagcgagcccacgcagcacaaccugcgcgggaccggccgggaggucuccgugaccccgcagagcgggaagaucaucuccagcugggaguccuacaagagcggcggcgagaccgggcugugaggacuaguacuggcugcaucucccuuuccucuguccuccauccuucucccaggauggugaagggggaccugguacccagugauccccaccccaggauccuaaaucaugacuuaccugcuaauaaaaacucauuggaaaagugagaagaucuaaaaaaaaaaaaaaaaaaaaaaaaaaaaaaaaaaaaaaaaaaaaaaaaaaaaaaaaaaaaaaaagaauu

SEQ ID NO: 70 - RNA, 938 nt, Artificial Sequence
  mRNA product HSD17B4_HsEPO(GC)_COX6B1_A64-C30-histoneSL
gggagagucccgcagucggcguccagcggcucugcuuguucgugugugugucguugcaggccuuauucaagcuuaccaugggcgugcacgagugccccgccuggcuguggcuccugcugagccuccugucccugccgcucgggcugcccguccugggcgcccccccgcggcucaucugcgacagccgcgugcuggagcgguaccugcucgaggcgaaggaggccgagaacaucaccaccgggugcgccgagcacugcucccugaacgagaacaucacggugccggacaccaaggucaacuucuacgccuggaagcgcauggaggugggccagcaggccguggaggucuggcaggggcuggcgcuccugagcgaggccgugcugcggggccaggcccuccuggugaacuccagccagcccugggagccccugcagcuccacgucgacaaggccguguccggccugcgcagccugaccacccuccugcgggcgcugggggcccagaaggaggccaucucccccccggacgccgccagcgcggccccgcuccgcacgaucaccgccgacaccuuccggaagcuguuccgcguguacuccaacuuccugcggggcaagcucaagcuguacaccggggaggccugccgcacgggcgaccggugaggacuaguacuggcugcaucucccuuuccucuguccuccauccuucucccaggauggugaagggggaccugguacccagugauccccaccccaggauccuaaaucaugacuuaccugcuaauaaaaacucauuggaaaagugagaagaucuaaaaaaaaaaaaaaaaaaaaaaaaaaaaaaaaaaaaaaaaaaaaaaaaaaaaaaaaaaaaaaaaugcaucccccccccccccccccccccccccccccccaaaggcucuuuucagagccaccagaauu

SEQ ID NO: 71 - RNA, 879 nt, Artificial Sequence
  mRNA product HSD17B4_HsEPO(GC)_COX6B1_A64
gggagagucccgcagucggcguccagcggcucugcuuguucgugugugugucguugcaggccuuauucaagcuuaccaugggcgugcacgagugccccgccuggcuguggcuccugcugagccuccugucccugccgcucgggcugcccguccugggcgcccccccgcggcucaucugcgacagccgcgugcuggagcgguaccugcucgaggcgaaggaggccgagaacaucaccaccgggugcgccgagcacugcucccugaacgagaacaucacggugccggacaccaaggucaacuucuacgccuggaagcgcauggaggugggccagcaggccguggaggucuggcaggggcuggcgcuccugagcgaggccgugcugcggggccaggcccuccuggugaacuccagccagcccugggagccccugcagcuccacgucgacaaggccguguccggccugcgcagccugaccacccuccugcgggcgcugggggcccagaaggaggccaucucccccccggacgccgccagcgcggccccgcuccgcacgaucaccgccgacaccuuccggaagcuguuccgcguguacuccaacuuccugcggggcaagcucaagcuguacaccggggaggccugccgcacgggcgaccggugaggacuaguacuggcugcaucucccuuuccucuguccuccauccuucucccaggauggugaagggggaccugguacccagugauccccaccccaggauccuaaaucaugacuuaccugcuaauaaaaacucauuggaaaagugagaagaucuaaaaaaaaaaaaaaaaaaaaaaaaaaaaaaaaaaaaaaaaaaaaaaaaaaaaaaaaaaaaaaaagaauu

SEQ ID NO: 72 - RNA, 2009 nt, Artificial Sequence
  mRNA product HSD17B4_PpLuc(GC)_COX6B1_A64-C30-histoneSL
gggagagucccgcagucggcguccagcggcucugcuuguucgugugugugucguugcaggccuuauucaagcuuaccauggaggacgccaagaacaucaagaagggcccggcgcccuucuacccgcuggaggacgggaccgccggcgagcagcuccacaaggccaugaagcgguacgcccuggugccgggcacgaucgccuucaccgacgcccacaucgaggucgacaucaccuacgcggaguacuucgagaugagcgugcgccuggccgaggccaugaagcgguacggccugaacaccaaccaccggaucguggugugcucggagaacagccugcaguucuucaugccggugcugggcgcccucuucaucggcguggccgucgccccggcgaacgacaucuacaacgagcgggagcugcugaacagcauggggaucagccagccgaccgugguguucgugagcaagaagggccugcagaagauccugaacgugcagaagaagcugcccaucauccagaagaucaucaucauggacagcaagaccgacuaccagggcuuccagucgauguacacguucgugaccagccaccucccgccgggcuucaacgaguacgacuucgucccggagagcuucgaccgggacaagaccaucgcccugaucaugaacagcagcggcagcaccggccugccgaaggggguggcccugccgcaccggaccgccugcgugcgcuucucgcacgcccgggaccccaucuucggcaaccagaucaucccggacaccgccauccugagcguggugccguuccaccacggcuucggcauguucacgacccugggcuaccucaucugcggcuuccgggugguccugauguaccgguucgaggaggagcuguuccugcggagccugcaggacuacaagauccagagcgcgcugcucgugccgacccuguucagcuucuucgccaagagcacccugaucgacaaguacgaccugucgaaccugcacgagaucgccagcgggggcgccccgcugagcaaggaggugggcgaggccguggccaagcgguuccaccucccgggcauccgccagggcuacggccugaccgagaccacgagcgcgauccugaucacccccgagggggacgacaagccgggcgccgugggcaagguggucccguucuucgaggccaaggugguggaccuggacaccggcaagacccugggcgugaaccagcggggcgagcugugcgugcgggggccgaugaucaugagcggcuacgugaacaacccggaggccaccaacgcccucaucgacaaggacggcuggcugcacagcggcgacaucgccuacugggacgaggacgagcacuucuucaucgucgaccggcugaagucgcugaucaaguacaagggcuaccagguggcgccggccgagcuggagagcauccugcuccagcaccccaacaucuucgacgccggcguggccgggcugccggacgacgacgccggcgagcugccggccgcggugguggugcuggagcacggcaagaccaugacggagaaggagaucgucgacuacguggccagccaggugaccaccgccaagaagcugcggggcggcgugguguucguggacgaggucccgaagggccugaccgggaagcucgacgcccggaagauccgcgagauccugaucaaggccaagaagggcggcaagaucgccgugugaggacuaguacuggcugcaucucccuuuccucuguccuccauccuucucccaggauggugaagggggaccugguacccagugauccccaccccaggauccuaaaucaugacuuaccugcuaauaaaaacucauuggaaaagugagaagaucuaaaaaaaaaaaaaaaaaaaaaaaaaaaaaaaaaaaaaaaaaaaaaaaaaaaaaaaaaaaaaaaaugcaucccccccccccccccccccccccccccccccaaaggcucuuuucagagccaccagaauu

SEQ ID NO: 73 - RNA, 1950 nt, Artificial Sequence
  mRNA product HSD17B4_PpLuc(GC)_COX6B1_A64
gggagagucccgcagucggcguccagcggcucugcuuguucgugugugugucguugcaggccuuauucaagcuuaccauggaggacgccaagaacaucaagaagggcccggcgcccuucuacccgcuggaggacgggaccgccggcgagcagcuccacaaggccaugaagcgguacgcccuggugccgggcacgaucgccuucaccgacgcccacaucgaggucgacaucaccuacgcggaguacuucgagaugagcgugcgccuggccgaggccaugaagcgguacggccugaacaccaaccaccggaucguggugugcucggagaacagccugcaguucuucaugccggugcugggcgcccucuucaucggcguggccgucgccccggcgaacgacaucuacaacgagcgggagcugcugaacagcauggggaucagccagccgaccgugguguucgugagcaagaagggccugcagaagauccugaacgugcagaagaagcugcccaucauccagaagaucaucaucauggacagcaagaccgacuaccagggcuuccagucgauguacacguucgugaccagccaccucccgccgggcuucaacgaguacgacuucgucccggagagcuucgaccgggacaagaccaucgcccugaucaugaacagcagcggcagcaccggccugccgaaggggguggcccugccgcaccggaccgccugcgugcgcuucucgcacgcccgggaccccaucuucggcaaccagaucaucccggacaccgccauccugagcguggugccguuccaccacggcuucggcauguucacgacccugggcuaccucaucugcggcuuccgggugguccugauguaccgguucgaggaggagcuguuccugcggagccugcaggacuacaagauccagagcgcgcugcucgugccgacccuguucagcuucuucgccaagagcacccugaucgacaaguacgaccugucgaaccugcacgagaucgccagcgggggcgccccgcugagcaaggaggugggcgaggccguggccaagcgguuccaccucccgggcauccgccagggcuacggccugaccgagaccacgagcgcgauccugaucacccccgagggggacgacaagccgggcgccgugggcaagguggucccguucuucgaggccaaggugguggaccuggacaccggcaagacccugggcgugaaccagcggggcgagcugugcgugcgggggccgaugaucaugagcggcuacgugaacaacccggaggccaccaacgcccucaucgacaaggacggcuggcugcacagcggcgacaucgccuacugggacgaggacgagcacuucuucaucgucgaccggcugaagucgcugaucaaguacaagggcuaccagguggcgccggccgagcuggagagcauccugcuccagcaccccaacaucuucgacgccggcguggccgggcugccggacgacgacgccggcgagcugccggccgcggugguggugcuggagcacggcaagaccaugacggagaaggagaucgucgacuacguggccagccaggugaccaccgccaagaagcugcggggcggcgugguguucguggacgaggucccgaagggccugaccgggaagcucgacgcccggaagauccgcgagauccugaucaaggccaagaagggcggcaagaucgccgugugaggacuaguacuggcugcaucucccuuuccucuguccuccauccuucucccaggauggugaagggggaccugguacccagugauccccaccccaggauccuaaaucaugacuuaccugcuaauaaaaacucauuggaaaagugagaagaucuaaaaaaaaaaaaaaaaaaaaaaaaaaaaaaaaaaaaaaaaaaaaaaaaaaaaaaaaaaaaaaaagaauu

SEQ ID NO: 74 - RNA, 2018 nt, Artificial Sequence
  mRNA product HSD17B4_protein of interest example 5_COX6B1_A64-C30-histoneSL
  misc_feature (78)..(1739): n is a, c, g, or u
gggagagucccgcagucggcguccagcggcucugcuuguucgugugugugucguugcaggccuuauucaagcuuaccnnnnnnnnnnnnnnnnnnnnnnnnnnnnnnnnnnnnnnnnnnnnnnnnnnnnnnnnnnnnnnnnnnnnnnnnnnnnnnnnnnnnnnnnnnnnnnnnnnnnnnnnnnnnnnnnnnnnnnnnnnnnnnnnnnnnnnnnnnnnnnnnnnnnnnnnnnnnnnnnnnnnnnnnnnnnnnnnnnnnnnnnnnnnnnnnnnnnnnnnnnnnnnnnnnnnnnnnnnnnnnnnnnnnnnnnnnnnnnnnnnnnnnnnnnnnnnnnnnnnnnnnnnnnnnnnnnnnnnnnnnnnnnnnnnnnnnnnnnnnnnnnnnnnnnnnnnnnnnnnnnnnnnnnnnnnnnnnnnnnnnnnnnnnnnnnnnnnnnnnnnnnnnnnnnnnnnnnnnnnnnnnnnnnnnnnnnnnnnnnnnnnnnnnnnnnnnnnnnnnnnnnnnnnnnnnnnnnnnnnnnnnnnnnnnnnnnnnnnnnnnnnnnnnnnnnnnnnnnnnnnnnnnnnnnnnnnnnnnnnnnnnnnnnnnnnnnnnnnnnnnnnnnnnnnnnnnnnnnnnnnnnnnnnnnnnnnnnnnnnnnnnnnnnnnnnnnnnnnnnnnnnnnnnnnnnnnnnnnnnnnnnnnnnnnnnnnnnnnnnnnnnnnnnnnnnnnnnnnnnnnnnnnnnnnnnnnnnnnnnnnnnnnnnnnnnnnnnnnnnnnnnnnnnnnnnnnnnnnnnnnnnnnnnnnnnnnnnnnnnnnnnnnnnnnnnnnnnnnnnnnnnnnnnnnnnnnnnnnnnnnnnnnnnnnnnnnnnnnnnnnnnnnnnnnnnnnnnnnnnnnnnnnnnnnnnnnnnnnnnnnnnnnnnnnnnnnnnnnnnnnnnnnnnnnnnnnnnnnnnnnnnnnnnnnnnnnnnnnnnnnnnnnnnnnnnnnnnnnnnnnnnnnnnnnnnnnnnnnnnnnnnnnnnnnnnnnnnnnnnnnnnnnnnnnnnnnnnnnnnnnnnnnnnnnnnnnnnnnnnnnnnnnnnnnnnnnnnnnnnnnnnnnnnnnnnnnnnnnnnnnnnnnnnnnnnnnnnnnnnnnnnnnnnnnnnnnnnnnnnnnnnnnnnnnnnnnnnnnnnnnnnnnnnnnnnnnnnnnnnnnnnnnnnnnnnnnnnnnnnnnnnnnnnnnnnnnnnnnnnnnnnnnnnnnnnnnnnnnnnnnnnnnnnnnnnnnnnnnnnnnnnnnnnnnnnnnnnnnnnnnnnnnnnnnnnnnnnnnnnnnnnnnnnnnnnnnnnnnnnnnnnnnnnnnnnnnnnnnnnnnnnnnnnnnnnnnnnnnnnnnnnnnnnnnnnnnnnnnnnnnnnnnnnnnnnnnnnnnnnnnnnnnnnnnnnnnnnnnnnnnnnnnnnnnnnnnnnnnnnnnnnnnnnnnnnnnnnnnnnnnnnnnnnnnnnnnnnnnnnnnnnnnnnnnnnnnnnnnnnnnnnnnnnnnnnnnnnnnnnnnnnnnnnnnnnnnnnnnnnnnnnnnnnnnnnnnnnnnnnnnnnnnnnnnnnnnnnnnnnnnnnnnnnnnnnnnnnnnnnnnnnnnnnnnnnnnnnnnnnnnnnnnnnnnnnnnnnnnnnnnnnnnnnnnnnnnnnnnnnnnnnnnnnnnnnnnnnnnnnnnnnnnnnnnnnnnnnnnnnnnnnnnnnnnnnnnnnnnnnnnnnnnnnnnnnnnnnnnnnnnggacuaguacuggcugcaucucccuuuccucuguccuccauccuucucccaggauggugaagggggaccugguacccagugauccccaccccaggauccuaaaucaugacuuaccugcuaauaaaaacucauuggaaaagugagaagaucuaaaaaaaaaaaaaaaaaaaaaaaaaaaaaaaaaaaaaaaaaaaaaaaaaaaaaaaaaaaaaaaaugcaucccccccccccccccccccccccccccccccaaaggcucuuuucagagccaccagaauu

SEQ ID NO: 75 - RNA, 2147 nt, Artificial Sequence
  mRNA product HSD17B4_RAV-G(GC)_Gnas_A64-C30-histoneSL
gggagagucccgcagucggcguccagcggcucugcuuguucgugugugugucguugcaggccuuauucaagcuuaccauggugccccaggcccuccuguucgucccgcugcugguguucccccucugcuucggcaaguuccccaucuacaccauccccgacaagcuggggccguggagccccaucgacauccaccaccuguccugccccaacaaccucguggucgaggacgagggcugcaccaaccugagcggguucuccuacauggagcugaaggugggcuacaucagcgccaucaagaugaacggguucacgugcaccggcguggucaccgaggcggagaccuacacgaacuucgugggcuacgugaccaccaccuucaagcggaagcacuuccgccccacgccggacgccugccgggccgccuacaacuggaagauggccggggacccccgcuacgaggagucccuccacaaccccuaccccgacuaccacuggcugcggaccgucaagaccaccaaggagagccuggugaucaucuccccgagcguggcggaccucgaccccuacgaccgcucccugcacagccgggucuuccccggcgggaacugcuccggcguggccgugagcuccacguacugcagcaccaaccacgacuacaccaucuggaugcccgagaacccgcgccuggggauguccugcgacaucuucaccaacagccggggcaagcgcgccuccaagggcagcgagacgugcggguucgucgacgagcggggccucuacaagucccugaagggggccugcaagcugaagcucugcggcgugcugggccugcgccucauggacgggaccuggguggcgaugcagaccagcaacgagaccaaguggugcccccccggccagcuggucaaccugcacgacuuccggagcgacgagaucgagcaccucgugguggaggagcuggucaagaagcgcgaggagugccuggacgcccucgaguccaucaugacgaccaagagcguguccuuccggcgccugagccaccuccggaagcuggugcccggguucggcaaggccuacaccaucuucaacaagacccugauggaggccgacgcccacuacaaguccguccgcacguggaacgagaucaucccgagcaaggggugccugcgggugggcggccgcugccacccccacgucaacgggguguucuucaacggcaucauccucgggcccgacggcaacgugcugauccccgagaugcaguccagccugcuccagcagcacauggagcugcuggucuccagcgugaucccgcucaugcacccccuggcggaccccuccaccguguucaagaacggggacgaggccgaggacuucgucgaggugcaccuccccgacgugcacgagcggaucagcggcgucgaccugggccugccgaacugggggaaguacgugcugcucuccgccggcgcccugaccgcccugaugcugaucaucuuccucaugaccugcuggcgccgggugaaccggagcgagcccacgcagcacaaccugcgcgggaccggccgggaggucuccgugaccccgcagagcgggaagaucaucuccagcugggaguccuacaagagcggcggcgagaccgggcugugaggacuagugaagggaacacccaaauuuaauucagccuuaagcacaauuaauuaagagugaaacguaauuguacaagcaguuggucacccaccauagggcaugaucaacaccgcaaccuuuccuuuuucccccagugauucugaaaaaccccucuucccuucagcuugcuuagauguuccaaauuuaguaagcuuaaggcggccuacagaagaaaaagaaaaaaaaggccacaaaaguucccucucacuuucaguaaauaaaauaaaagcagcaacagaaauaaagaaauaaaugaaauucaaaaugaaauaaauauuguguugugcagcauuaaaaaaucaauaaaaauuaaaaaugagcaagaucuaaaaaaaaaaaaaaaaaaaaaaaaaaaaaaaaaaaaaaaaaaaaaaaaaaaaaaaaaaaaaaaaugcaucccccccccccccccccccccccccccccccaaaggcucuuuucagagccaccagaauu

SEQ ID NO: 76 - RNA, 2088 nt, Artificial Sequence
  mRNA product HSD17B4_RAV-G(GC)_Gnas_A64
gggagagucccgcagucggcguccagcggcucugcuuguucgugugugugucguugcaggccuuauucaagcuuaccauggugccccaggcccuccuguucgucccgcugcugguguucccccucugcuucggcaaguuccccaucuacaccauccccgacaagcuggggccguggagccccaucgacauccaccaccuguccugccccaacaaccucguggucgaggacgagggcugcaccaaccugagcggguucuccuacauggagcugaaggugggcuacaucagcgccaucaagaugaacggguucacgugcaccggcguggucaccgaggcggagaccuacacgaacuucgugggcuacgugaccaccaccuucaagcggaagcacuuccgccccacgccggacgccugccgggccgccuacaacuggaagauggccggggacccccgcuacgaggagucccuccacaaccccuaccccgacuaccacuggcugcggaccgucaagaccaccaaggagagccuggugaucaucuccccgagcguggcggaccucgaccccuacgaccgcucccugcacagccgggucuuccccggcgggaacugcuccggcguggccgugagcuccacguacugcagcaccaaccacgacuacaccaucuggaugcccgagaacccgcgccuggggauguccugcgacaucuucaccaacagccggggcaagcgcgccuccaagggcagcgagacgugcggguucgucgacgagcggggccucuacaagucccugaagggggccugcaagcugaagcucugcggcgugcugggccugcgccucauggacgggaccuggguggcgaugcagaccagcaacgagaccaaguggugcccccccggccagcuggucaaccugcacgacuuccggagcgacgagaucgagcaccucgugguggaggagcuggucaagaagcgcgaggagugccuggacgcccucgaguccaucaugacgaccaagagcguguccuuccggcgccugagccaccuccggaagcuggugcccggguucggcaaggccuacaccaucuucaacaagacccugauggaggccgacgcccacuacaaguccguccgcacguggaacgagaucaucccgagcaaggggugccugcgggugggcggccgcugccacccccacgucaacgggguguucuucaacggcaucauccucgggcccgacggcaacgugcugauccccgagaugcaguccagccugcuccagcagcacauggagcugcuggucuccagcgugaucccgcucaugcacccccuggcggaccccuccaccguguucaagaacggggacgaggccgaggacuucgucgaggugcaccuccccgacgugcacgagcggaucagcggcgucgaccugggccugccgaacugggggaaguacgugcugcucuccgccggcgcccugaccgcccugaugcugaucaucuuccucaugaccugcuggcgccgggugaaccggagcgagcccacgcagcacaaccugcgcgggaccggccgggaggucuccgugaccccgcagagcgggaagaucaucuccagcugggaguccuacaagagcggcggcgagaccgggcugugaggacuagugaagggaacacccaaauuuaauucagccuuaagcacaauuaauuaagagugaaacguaauuguacaagcaguuggucacccaccauagggcaugaucaacaccgcaaccuuuccuuuuucccccagugauucugaaaaaccccucuucccuucagcuugcuuagauguuccaaauuuaguaagcuuaaggcggccuacagaagaaaaagaaaaaaaaggccacaaaaguucccucucacuuucaguaaauaaaauaaaagcagcaacagaaauaaagaaauaaaugaaauucaaaaugaaauaaauauuguguugugcagcauuaaaaaaucaauaaaaauuaaaaaugagcaagaucuaaaaaaaaaaaaaaaaaaaaaaaaaaaaaaaaaaaaaaaaaaaaaaaaaaaaaaaaaaaaaaaagaauu

SEQ ID NO: 77 - RNA, 1154 nt, Artificial Sequence
  mRNA product HSD17B4_HsEPO(GC)_Gnas_A64-C30-histoneSL
gggagagucccgcagucggcguccagcggcucugcuuguucgugugugugucguugcaggccuuauucaagcuuaccaugggcgugcacgagugccccgccuggcuguggcuccugcugagccuccugucccugccgcucgggcugcccguccugggcgcccccccgcggcucaucugcgacagccgcgugcuggagcgguaccugcucgaggcgaaggaggccgagaacaucaccaccgggugcgccgagcacugcucccugaacgagaacaucacggugccggacaccaaggucaacuucuacgccuggaagcgcauggaggugggccagcaggccguggaggucuggcaggggcuggcgcuccugagcgaggccgugcugcggggccaggcccuccuggugaacuccagccagcccugggagccccugcagcuccacgucgacaaggccguguccggccugcgcagccugaccacccuccugcgggcgcugggggcccagaaggaggccaucucccccccggacgccgccagcgcggccccgcuccgcacgaucaccgccgacaccuuccggaagcuguuccgcguguacuccaacuuccugcggggcaagcucaagcuguacaccggggaggccugccgcacgggcgaccggugaggacuagugaagggaacacccaaauuuaauucagccuuaagcacaauuaauuaagagugaaacguaauuguacaagcaguuggucacccaccauagggcaugaucaacaccgcaaccuuuccuuuuucccccagugauucugaaaaaccccucuucccuucagcuugcuuagauguuccaaauuuaguaagcuuaaggcggccuacagaagaaaaagaaaaaaaaggccacaaaaguucccucucacuuucaguaaauaaaauaaaagcagcaacagaaauaaagaaauaaaugaaauucaaaaugaaauaaauauuguguugugcagcauuaaaaaaucaauaaaaauuaaaaaugagcaagaucuaaaaaaaaaaaaaaaaaaaaaaaaaaaaaaaaaaaaaaaaaaaaaaaaaaaaaaaaaaaaaaaaugcaucccccccccccccccccccccccccccccccaaaggcucuuuucagagccaccagaauu

SEQ ID NO: 78 - RNA, 1095 nt, Artificial Sequence
  mRNA product HSD17B4_HsEPO(GC)_Gnas_A64
gggagagucccgcagucggcguccagcggcucugcuuguucgugugugugucguugcaggccuuauucaagcuuaccaugggcgugcacgagugccccgccuggcuguggcuccugcugagccuccugucccugccgcucgggcugcccguccugggcgcccccccgcggcucaucugcgacagccgcgugcuggagcgguaccugcucgaggcgaaggaggccgagaacaucaccaccgggugcgccgagcacugcucccugaacgagaacaucacggugccggacaccaaggucaacuucuacgccuggaagcgcauggaggugggccagcaggccguggaggucuggcaggggcuggcgcuccugagcgaggccgugcugcggggccaggcccuccuggugaacuccagccagcccugggagccccugcagcuccacgucgacaaggccguguccggccugcgcagccugaccacccuccugcgggcgcugggggcccagaaggaggccaucucccccccggacgccgccagcgcggccccgcuccgcacgaucaccgccgacaccuuccggaagcuguuccgcguguacuccaacuuccugcggggcaagcucaagcuguacaccggggaggccugccgcacgggcgaccggugaggacuagugaagggaacacccaaauuuaauucagccuuaagcacaauuaauuaagagugaaacguaauuguacaagcaguuggucacccaccauagggcaugaucaacaccgcaaccuuuccuuuuucccccagugauucugaaaaaccccucuucccuucagcuugcuuagauguuccaaauuuaguaagcuuaaggcggccuacagaagaaaaagaaaaaaaaggccacaaaaguucccucucacuuucaguaaauaaaauaaaagcagcaacagaaauaaagaaauaaaugaaauucaaaaugaaauaaauauuguguugugcagcauuaaaaaaucaauaaaaauuaaaaaugagcaagaucuaaaaaaaaaaaaaaaaaaaaaaaaaaaaaaaaaaaaaaaaaaaaaaaaaaaaaaaaaaaaaaaagaauu

SEQ ID NO: 79 - RNA, 2225 nt, Artificial Sequence
  mRNA product HSD17B4_PpLuc(GC)_Gnas_A64-C30-histoneSL
gggagagucccgcagucggcguccagcggcucugcuuguucgugugugugucguugcaggccuuauucaagcuuaccauggaggacgccaagaacaucaagaagggcccggcgcccuucuacccgcuggaggacgggaccgccggcgagcagcuccacaaggccaugaagcgguacgcccuggugccgggcacgaucgccuucaccgacgcccacaucgaggucgacaucaccuacgcggaguacuucgagaugagcgugcgccuggccgaggccaugaagcgguacggccugaacaccaaccaccggaucguggugugcucggagaacagccugcaguucuucaugccggugcugggcgcccucuucaucggcguggccgucgccccggcgaacgacaucuacaacgagcgggagcugcugaacagcauggggaucagccagccgaccgugguguucgugagcaagaagggccugcagaagauccugaacgugcagaagaagcugcccaucauccagaagaucaucaucauggacagcaagaccgacuaccagggcuuccagucgauguacacguucgugaccagccaccucccgccgggcuucaacgaguacgacuucgucccggagagcuucgaccgggacaagaccaucgcccugaucaugaacagcagcggcagcaccggccugccgaaggggguggcccugccgcaccggaccgccugcgugcgcuucucgcacgcccgggaccccaucuucggcaaccagaucaucccggacaccgccauccugagcguggugccguuccaccacggcuucggcauguucacgacccugggcuaccucaucugcggcuuccgggugguccugauguaccgguucgaggaggagcuguuccugcggagccugcaggacuacaagauccagagcgcgcugcucgugccgacccuguucagcuucuucgccaagagcacccugaucgacaaguacgaccugucgaaccugcacgagaucgccagcgggggcgccccgcugagcaaggaggugggcgaggccguggccaagcgguuccaccucccgggcauccgccagggcuacggccugaccgagaccacgagcgcgauccugaucacccccgagggggacgacaagccgggcgccgugggcaagguggucccguucuucgaggccaaggugguggaccuggacaccggcaagacccugggcgugaaccagcggggcgagcugugcgugcgggggccgaugaucaugagcggcuacgugaacaacccggaggccaccaacgcccucaucgacaaggacggcuggcugcacagcggcgacaucgccuacugggacgaggacgagcacuucuucaucgucgaccggcugaagucgcugaucaaguacaagggcuaccagguggcgccggccgagcuggagagcauccugcuccagcaccccaacaucuucgacgccggcguggccgggcugccggacgacgacgccggcgagcugccggccgcggugguggugcuggagcacggcaagaccaugacggagaaggagaucgucgacuacguggccagccaggugaccaccgccaagaagcugcggggcggcgugguguucguggacgaggucccgaagggccugaccgggaagcucgacgcccggaagauccgcgagauccugaucaaggccaagaagggcggcaagaucgccgugugaggacuagugaagggaacacccaaauuuaauucagccuuaagcacaauuaauuaagagugaaacguaauuguacaagcaguuggucacccaccauagggcaugaucaacaccgcaaccuuuccuuuuucccccagugauucugaaaaaccccucuucccuucagcuugcuuagauguuccaaauuuaguaagcuuaaggcggccuacagaagaaaaagaaaaaaaaggccacaaaaguucccucucacuuucaguaaauaaaauaaaagcagcaacagaaauaaagaaauaaaugaaauucaaaaugaaauaaauauuguguugugcagcauuaaaaaaucaauaaaaauuaaaaaugagcaagaucuaaaaaaaaaaaaaaaaaaaaaaaaaaaaaaaaaaaaaaaaaaaaaaaaaaaaaaaaaaaaaaaaugcaucccccccccccccccccccccccccccccccaaaggcucuuuucagagccaccagaauu

SEQ ID NO: 80 - RNA, 2166 nt, Artificial Sequence
  mRNA product HSD17B4_PpLuc(GC)_Gnas_A64
gggagagucccgcagucggcguccagcggcucugcuuguucgugugugugucguugcaggccuuauucaagcuuaccauggaggacgccaagaacaucaagaagggcccggcgcccuucuacccgcuggaggacgggaccgccggcgagcagcuccacaaggccaugaagcgguacgcccuggugccgggcacgaucgccuucaccgacgcccacaucgaggucgacaucaccuacgcggaguacuucgagaugagcgugcgccuggccgaggccaugaagcgguacggccugaacaccaaccaccggaucguggugugcucggagaacagccugcaguucuucaugccggugcugggcgcccucuucaucggcguggccgucgccccggcgaacgacaucuacaacgagcgggagcugcugaacagcauggggaucagccagccgaccgugguguucgugagcaagaagggccugcagaagauccugaacgugcagaagaagcugcccaucauccagaagaucaucaucauggacagcaagaccgacuaccagggcuuccagucgauguacacguucgugaccagccaccucccgccgggcuucaacgaguacgacuucgucccggagagcuucgaccgggacaagaccaucgcccugaucaugaacagcagcggcagcaccggccugccgaaggggguggcccugccgcaccggaccgccugcgugcgcuucucgcacgcccgggaccccaucuucggcaaccagaucaucccggacaccgccauccugagcguggugccguuccaccacggcuucggcauguucacgacccugggcuaccucaucugcggcuuccgggugguccugauguaccgguucgaggaggagcuguuccugcggagccugcaggacuacaagauccagagcgcgcugcucgugccgacccuguucagcuucuucgccaagagcacccugaucgacaaguacgaccugucgaaccugcacgagaucgccagcgggggcgccccgcugagcaaggaggugggcgaggccguggccaagcgguuccaccucccgggcauccgccagggcuacggccugaccgagaccacgagcgcgauccugaucacccccgagggggacgacaagccgggcgccgugggcaagguggucccguucuucgaggccaaggugguggaccuggacaccggcaagacccugggcgugaaccagcggggcgagcugugcgugcgggggccgaugaucaugagcggcuacgugaacaacccggaggccaccaacgcccucaucgacaaggacggcuggcugcacagcggcgacaucgccuacugggacgaggacgagcacuucuucaucgucgaccggcugaagucgcugaucaaguacaagggcuaccagguggcgccggccgagcuggagagcauccugcuccagcaccccaacaucuucgacgccggcguggccgggcugccggacgacgacgccggcgagcugccggccgcggugguggugcuggagcacggcaagaccaugacggagaaggagaucgucgacuacguggccagccaggugaccaccgccaagaagcugcggggcggcgugguguucguggacgaggucccgaagggccugaccgggaagcucgacgcccggaagauccgcgagauccugaucaaggccaagaagggcggcaagaucgccgugugaggacuagugaagggaacacccaaauuuaauucagccuuaagcacaauuaauuaagagugaaacguaauuguacaagcaguuggucacccaccauagggcaugaucaacaccgcaaccuuuccuuuuucccccagugauucugaaaaaccccucuucccuucagcuugcuuagauguuccaaauuuaguaagcuuaaggcggccuacagaagaaaaagaaaaaaaaggccacaaaaguucccucucacuuucaguaaauaaaauaaaagcagcaacagaaauaaagaaauaaaugaaauucaaaaugaaauaaauauuguguugugcagcauuaaaaaaucaauaaaaauuaaaaaugagcaagaucuaaaaaaaaaaaaaaaaaaaaaaaaaaaaaaaaaaaaaaaaaaaaaaaaaaaaaaaaaaaaaaaagaauu

SEQ ID NO: 81 - RNA, 2234 nt, Artificial Sequence
  mRNA product HSD17B4_protein of interest example 5_Gnas_A64-C30-histoneSL
  misc_feature (78)..(1739): n is a, c, g, or u
gggagagucccgcagucggcguccagcggcucugcuuguucgugugugugucguugcaggccuuauucaagcuuaccnnnnnnnnnnnnnnnnnnnnnnnnnnnnnnnnnnnnnnnnnnnnnnnnnnnnnnnnnnnnnnnnnnnnnnnnnnnnnnnnnnnnnnnnnnnnnnnnnnnnnnnnnnnnnnnnnnnnnnnnnnnnnnnnnnnnnnnnnnnnnnnnnnnnnnnnnnnnnnnnnnnnnnnnnnnnnnnnnnnnnnnnnnnnnnnnnnnnnnnnnnnnnnnnnnnnnnnnnnnnnnnnnnnnnnnnnnnnnnnnnnnnnnnnnnnnnnnnnnnnnnnnnnnnnnnnnnnnnnnnnnnnnnnnnnnnnnnnnnnnnnnnnnnnnnnnnnnnnnnnnnnnnnnnnnnnnnnnnnnnnnnnnnnnnnnnnnnnnnnnnnnnnnnnnnnnnnnnnnnnnnnnnnnnnnnnnnnnnnnnnnnnnnnnnnnnnnnnnnnnnnnnnnnnnnnnnnnnnnnnnnnnnnnnnnnnnnnnnnnnnnnnnnnnnnnnnnnnnnnnnnnnnnnnnnnnnnnnnnnnnnnnnnnnnnnnnnnnnnnnnnnnnnnnnnnnnnnnnnnnnnnnnnnnnnnnnnnnnnnnnnnnnnnnnnnnnnnnnnnnnnnnnnnnnnnnnnnnnnnnnnnnnnnnnnnnnnnnnnnnnnnnnnnnnnnnnnnnnnnnnnnnnnnnnnnnnnnnnnnnnnnnnnnnnnnnnnnnnnnnnnnnnnnnnnnnnnnnnnnnnnnnnnnnnnnnnnnnnnnnnnnnnnnnnnnnnnnnnnnnnnnnnnnnnnnnnnnnnnnnnnnnnnnnnnnnnnnnnnnnnnnnnnnnnnnnnnnnnnnnnnnnnnnnnnnnnnnnnnnnnnnnnnnnnnnnnnnnnnnnnnnnnnnnnnnnnnnnnnnnnnnnnnnnnnnnnnnnnnnnnnnnnnnnnnnnnnnnnnnnnnnnnnnnnnnnnnnnnnnnnnnnnnnnnnnnnnnnnnnnnnnnnnnnnnnnnnnnnnnnnnnnnnnnnnnnnnnnnnnnnnnnnnnnnnnnnnnnnnnnnnnnnnnnnnnnnnnnnnnnnnnnnnnnnnnnnnnnnnnnnnnnnnnnnnnnnnnnnnnnnnnnnnnnnnnnnnnnnnnnnnnnnnnnnnnnnnnnnnnnnnnnnnnnnnnnnnnnnnnnnnnnnnnnnnnnnnnnnnnnnnnnnnnnnnnnnnnnnnnnnnnnnnnnnnnnnnnnnnnnnnnnnnnnnnnnnnnnnnnnnnnnnnnnnnnnnnnnnnnnnnnnnnnnnnnnnnnnnnnnnnnnnnnnnnnnnnnnnnnnnnnnnnnnnnnnnnnnnnnnnnnnnnnnnnnnnnnnnnnnnnnnnnnnnnnnnnnnnnnnnnnnnnnnnnnnnnnnnnnnnnnnnnnnnnnnnnnnnnnnnnnnnnnnnnnnnnnnnnnnnnnnnnnnnnnnnnnnnnnnnnnnnnnnnnnnnnnnnnnnnnnnnnnnnnnnnnnnnnnnnnnnnnnnnnnnnnnnnnnnnnnnnnnnnnnnnnnnnnnnnnnnnnnnnnnnnnnnnnnnnnnnnnnnnnnnnnnnnnnnnnnnnnnnnnnnnnnnnnnnnnnnnnnnnnnnnnnnnnnnnnnnnnnnnnnnnnnnnnnnnnnnnnnnnnnnnnnnnnnnnnnnnnnnnnnnnnnnnnnnnnnnnnnnnnnnnnnnnnnnnnnnnnnnnnnnnnnnnnnnnnggacuagugaagggaacacccaaauuuaauucagccuuaagcacaauuaauuaagagugaaacguaauuguacaagcaguuggucacccaccauagggcaugaucaacaccgcaaccuuuccuuuuucccccagugauucugaaaaaccccucuucccuucagcuugcuuagauguuccaaauuuaguaagcuuaaggcggccuacagaagaaaaagaaaaaaaaggccacaaaaguucccucucacuuucaguaaauaaaauaaaagcagcaacagaaauaaagaaauaaaugaaauucaaaaugaaauaaauauuguguugugcagcauuaaaaaaucaauaaaaauuaaaaaugagcaagaucuaaaaaaaaaaaaaaaaaaaaaaaaaaaaaaaaaaaaaaaaaaaaaaaaaaaaaaaaaaaaaaaaugcaucccccccccccccccccccccccccccccccaaaggcucuuuucagagccaccagaauu

SEQ ID NO: 82 - RNA, 1927 nt, Artificial Sequence
  mRNA product HSD17B4_RAV-G(GC)_Ndufa1_A64-C30-histoneSL
gggagagucccgcagucggcguccagcggcucugcuuguucgugugugugucguugcaggccuuauucaagcuuaccauggugccccaggcccuccuguucgucccgcugcugguguucccccucugcuucggcaaguuccccaucuacaccauccccgacaagcuggggccguggagccccaucgacauccaccaccuguccugccccaacaaccucguggucgaggacgagggcugcaccaaccugagcggguucuccuacauggagcugaaggugggcuacaucagcgccaucaagaugaacggguucacgugcaccggcguggucaccgaggcggagaccuacacgaacuucgugggcuacgugaccaccaccuucaagcggaagcacuuccgccccacgccggacgccugccgggccgccuacaacuggaagauggccggggacccccgcuacgaggagucccuccacaaccccuaccccgacuaccacuggcugcggaccgucaagaccaccaaggagagccuggugaucaucuccccgagcguggcggaccucgaccccuacgaccgcucccugcacagccgggucuuccccggcgggaacugcuccggcguggccgugagcuccacguacugcagcaccaaccacgacuacaccaucuggaugcccgagaacccgcgccuggggauguccugcgacaucuucaccaacagccggggcaagcgcgccuccaagggcagcgagacgugcggguucgucgacgagcggggccucuacaagucccugaagggggccugcaagcugaagcucugcggcgugcugggccugcgccucauggacgggaccuggguggcgaugcagaccagcaacgagaccaaguggugcccccccggccagcuggucaaccugcacgacuuccggagcgacgagaucgagcaccucgugguggaggagcuggucaagaagcgcgaggagugccuggacgcccucgaguccaucaugacgaccaagagcguguccuuccggcgccugagccaccuccggaagcuggugcccggguucggcaaggccuacaccaucuucaacaagacccugauggaggccgacgcccacuacaaguccguccgcacguggaacgagaucaucccgagcaaggggugccugcgggugggcggccgcugccacccccacgucaacgggguguucuucaacggcaucauccucgggcccgacggcaacgugcugauccccgagaugcaguccagccugcuccagcagcacauggagcugcuggucuccagcgugaucccgcucaugcacccccuggcggaccccuccaccguguucaagaacggggacgaggccgaggacuucgucgaggugcaccuccccgacgugcacgagcggaucagcggcgucgaccugggccugccgaacugggggaaguacgugcugcucuccgccggcgcccugaccgcccugaugcugaucaucuuccucaugaccugcuggcgccgggugaaccggagcgagcccacgcagcacaaccugcgcgggaccggccgggaggucuccgugaccccgcagagcgggaagaucaucuccagcugggaguccuacaagagcggcggcgagaccgggcugugaggacuaguggaagcauuuuccuggcugauuaaaagaaauuacucagcuauggucaucuguuccuguuagaaggcuaugcagcauauuauauacuaugcgcauguuaugaaaugcauaauaaaaaauuuuaaaaaaucuaaaagaucuaaaaaaaaaaaaaaaaaaaaaaaaaaaaaaaaaaaaaaaaaaaaaaaaaaaaaaaaaaaaaaaaugcaucccccccccccccccccccccccccccccccaaaggcucuuuucagagccaccagaauu

SEQ ID NO: 83 - RNA, 1868 nt, Artificial Sequence
  mRNA product HSD17B4_RAV-G(GC)_Ndufa1_A64
gggagagucccgcagucggcguccagcggcucugcuuguucgugugugugucguugcaggccuuauucaagcuuaccauggugccccaggcccuccuguucgucccgcugcugguguucccccucugcuucggcaaguuccccaucuacaccauccccgacaagcuggggccguggagccccaucgacauccaccaccuguccugccccaacaaccucguggucgaggacgagggcugcaccaaccugagcggguucuccuacauggagcugaaggugggcuacaucagcgccaucaagaugaacggguucacgugcaccggcguggucaccgaggcggagaccuacacgaacuucgugggcuacgugaccaccaccuucaagcggaagcacuuccgccccacgccggacgccugccgggccgccuacaacuggaagauggccggggacccccgcuacgaggagucccuccacaaccccuaccccgacuaccacuggcugcggaccgucaagaccaccaaggagagccuggugaucaucuccccgagcguggcggaccucgaccccuacgaccgcucccugcacagccgggucuuccccggcgggaacugcuccggcguggccgugagcuccacguacugcagcaccaaccacgacuacaccaucuggaugcccgagaacccgcgccuggggauguccugcgacaucuucaccaacagccggggcaagcgcgccuccaagggcagcgagacgugcggguucgucgacgagcggggccucuacaagucccugaagggggccugcaagcugaagcucugcggcgugcugggccugcgccucauggacgggaccuggguggcgaugcagaccagcaacgagaccaaguggugcccccccggccagcuggucaaccugcacgacuuccggagcgacgagaucgagcaccucgugguggaggagcuggucaagaagcgcgaggagugccuggacgcccucgaguccaucaugacgaccaagagcguguccuuccggcgccugagccaccuccggaagcuggugcccggguucggcaaggccuacaccaucuucaacaagacccugauggaggccgacgcccacuacaaguccguccgcacguggaacgagaucaucccgagcaaggggugccugcgggugggcggccgcugccacccccacgucaacgggguguucuucaacggcaucauccucgggcccgacggcaacgugcugauccccgagaugcaguccagccugcuccagcagcacauggagcugcuggucuccagcgugaucccgcucaugcacccccuggcggaccccuccaccguguucaagaacggggacgaggccgaggacuucgucgaggugcaccuccccgacgugcacgagcggaucagcggcgucgaccugggccugccgaacugggggaaguacgugcugcucuccgccggcgcccugaccgcccugaugcugaucaucuuccucaugaccugcuggcgccgggugaaccggagcgagcccacgcagcacaaccugcgcgggaccggccgggaggucuccgugaccccgcagagcgggaagaucaucuccagcugggaguccuacaagagcggcggcgagaccgggcugugaggacuaguggaagcauuuuccuggcugauuaaaagaaauuacucagcuauggucaucuguuccuguuagaaggcuaugcagcauauuauauacuaugcgcauguuaugaaaugcauaauaaaaaauuuuaaaaaaucuaaaagaucuaaaaaaaaaaaaaaaaaaaaaaaaaaaaaaaaaaaaaaaaaaaaaaaaaaaaaaaaaaaaaaaagaauu

SEQ ID NO: 84 - RNA, 934 nt, Artificial Sequence
  mRNA product HSD17B4_HsEPO(GC)_Ndufa1_A64-C30-histoneSL
gggagagucccgcagucggcguccagcggcucugcuuguucgugugugugucguugcaggccuuauucaagcuuaccaugggcgugcacgagugccccgccuggcuguggcuccugcugagccuccugucccugccgcucgggcugcccguccugggcgcccccccgcggcucaucugcgacagccgcgugcuggagcgguaccugcucgaggcgaaggaggccgagaacaucaccaccgggugcgccgagcacugcucccugaacgagaacaucacggugccggacaccaaggucaacuucuacgccuggaagcgcauggaggugggccagcaggccguggaggucuggcaggggcuggcgcuccugagcgaggccgugcugcggggccaggcccuccuggugaacuccagccagcccugggagccccugcagcuccacgucgacaaggccguguccggccugcgcagccugaccacccuccugcgggcgcugggggcccagaaggaggccaucucccccccggacgccgccagcgcggccccgcuccgcacgaucaccgccgacaccuuccggaagcuguuccgcguguacuccaacuuccugcggggcaagcucaagcuguacaccggggaggccugccgcacgggcgaccggugaggacuaguggaagcauuuuccuggcugauuaaaagaaauuacucagcuauggucaucuguuccuguuagaaggcuaugcagcauauuauauacuaugcgcauguuaugaaaugcauaauaaaaaauuuuaaaaaaucuaaaagaucuaaaaaaaaaaaaaaaaaaaaaaaaaaaaaaaaaaaaaaaaaaaaaaaaaaaaaaaaaaaaaaaaugcaucccccccccccccccccccccccccccccccaaaggcucuuuucagagccaccagaauu

SEQ ID NO: 85 - RNA, 875 nt, Artificial Sequence
  mRNA product HSD17B4_HsEPO(GC)_Ndufa1_A64
gggagagucccgcagucggcguccagcggcucugcuuguucgugugugugucguugcaggccuuauucaagcuuaccaugggcgugcacgagugccccgccuggcuguggcuccugcugagccuccugucccugccgcucgggcugcccguccugggcgcccccccgcggcucaucugcgacagccgcgugcuggagcgguaccugcucgaggcgaaggaggccgagaacaucaccaccgggugcgccgagcacugcucccugaacgagaacaucacggugccggacaccaaggucaacuucuacgccuggaagcgcauggaggugggccagcaggccguggaggucuggcaggggcuggcgcuccugagcgaggccgugcugcggggccaggcccuccuggugaacuccagccagcccugggagccccugcagcuccacgucgacaaggccguguccggccugcgcagccugaccacccuccugcgggcgcugggggcccagaaggaggccaucucccccccggacgccgccagcgcggccccgcuccgcacgaucaccgccgacaccuuccggaagcuguuccgcguguacuccaacuuccugcggggcaagcucaagcuguacaccggggaggccugccgcacgggcgaccggugaggacuaguggaagcauuuuccuggcugauuaaaagaaauuacucagcuauggucaucuguuccuguuagaaggcuaugcagcauauuauauacuaugcgcauguuaugaaaugcauaauaaaaaauuuuaaaaaaucuaaaagaucuaaaaaaaaaaaaaaaaaaaaaaaaaaaaaaaaaaaaaaaaaaaaaaaaaaaaaaaaaaaaaaaagaauu

SEQ ID NO: 86 - RNA, 2005 nt, Artificial Sequence
  mRNA product HSD17B4_PpLuc(GC)_Ndufa1_A64-C30-histoneSL
gggagagucccgcagucggcguccagcggcucugcuuguucgugugugugucguugcaggccuuauucaagcuuaccauggaggacgccaagaacaucaagaagggcccggcgcccuucuacccgcuggaggacgggaccgccggcgagcagcuccacaaggccaugaagcgguacgcccuggugccgggcacgaucgccuucaccgacgcccacaucgaggucgacaucaccuacgcggaguacuucgagaugagcgugcgccuggccgaggccaugaagcgguacggccugaacaccaaccaccggaucguggugugcucggagaacagccugcaguucuucaugccggugcugggcgcccucuucaucggcguggccgucgccccggcgaacgacaucuacaacgagcgggagcugcugaacagcauggggaucagccagccgaccgugguguucgugagcaagaagggccugcagaagauccugaacgugcagaagaagcugcccaucauccagaagaucaucaucauggacagcaagaccgacuaccagggcuuccagucgauguacacguucgugaccagccaccucccgccgggcuucaacgaguacgacuucgucccggagagcuucgaccgggacaagaccaucgcccugaucaugaacagcagcggcagcaccggccugccgaaggggguggcccugccgcaccggaccgccugcgugcgcuucucgcacgcccgggaccccaucuucggcaaccagaucaucccggacaccgccauccugagcguggugccguuccaccacggcuucggcauguucacgacccugggcuaccucaucugcggcuuccgggugguccugauguaccgguucgaggaggagcuguuccugcggagccugcaggacuacaagauccagagcgcgcugcucgugccgacccuguucagcuucuucgccaagagcacccugaucgacaaguacgaccugucgaaccugcacgagaucgccagcgggggcgccccgcugagcaaggaggugggcgaggccguggccaagcgguuccaccucccgggcauccgccagggcuacggccugaccgagaccacgagcgcgauccugaucacccccgagggggacgacaagccgggcgccgugggcaagguggucccguucuucgaggccaaggugguggaccuggacaccggcaagacccugggcgugaaccagcggggcgagcugugcgugcgggggccgaugaucaugagcggcuacgugaacaacccggaggccaccaacgcccucaucgacaaggacggcuggcugcacagcggcgacaucgccuacugggacgaggacgagcacuucuucaucgucgaccggcugaagucgcugaucaaguacaagggcuaccagguggcgccggccgagcuggagagcauccugcuccagcaccccaacaucuucgacgccggcguggccgggcugccggacgacgacgccggcgagcugccggccgcggugguggugcuggagcacggcaagaccaugacggagaaggagaucgucgacuacguggccagccaggugaccaccgccaagaagcugcggggcggcgugguguucguggacgaggucccgaagggccugaccgggaagcucgacgcccggaagauccgcgagauccugaucaaggccaagaagggcggcaagaucgccgugugaggacuaguggaagcauuuuccuggcugauuaaaagaaauuacucagcuauggucaucuguuccuguuagaaggcuaugcagcauauuauauacuaugcgcauguuaugaaaugcauaauaaaaaauuuuaaaaaaucuaaaagaucuaaaaaaaaaaaaaaaaaaaaaaaaaaaaaaaaaaaaaaaaaaaaaaaaaaaaaaaaaaaaaaaaugcaucccccccccccccccccccccccccccccccaaaggcucuuuucagagccaccagaauu

SEQ ID NO: 87 - RNA, 1946 nt, Artificial Sequence
  mRNA product HSD17B4_PpLuc(GC)_Ndufa1_A64
gggagagucccgcagucggcguccagcggcucugcuuguucgugugugugucguugcaggccuuauucaagcuuaccauggaggacgccaagaacaucaagaagggcccggcgcccuucuacccgcuggaggacgggaccgccggcgagcagcuccacaaggccaugaagcgguacgcccuggugccgggcacgaucgccuucaccgacgcccacaucgaggucgacaucaccuacgcggaguacuucgagaugagcgugcgccuggccgaggccaugaagcgguacggccugaacaccaaccaccggaucguggugugcucggagaacagccugcaguucuucaugccggugcugggcgcccucuucaucggcguggccgucgccccggcgaacgacaucuacaacgagcgggagcugcugaacagcauggggaucagccagccgaccgugguguucgugagcaagaagggccugcagaagauccugaacgugcagaagaagcugcccaucauccagaagaucaucaucauggacagcaagaccgacuaccagggcuuccagucgauguacacguucgugaccagccaccucccgccgggcuucaacgaguacgacuucgucccggagagcuucgaccgggacaagaccaucgcccugaucaugaacagcagcggcagcaccggccugccgaaggggguggcccugccgcaccggaccgccugcgugcgcuucucgcacgcccgggaccccaucuucggcaaccagaucaucccggacaccgccauccugagcguggugccguuccaccacggcuucggcauguucacgacccugggcuaccucaucugcggcuuccgggugguccugauguaccgguucgaggaggagcuguuccugcggagccugcaggacuacaagauccagagcgcgcugcucgugccgacccuguucagcuucuucgccaagagcacccugaucgacaaguacgaccugucgaaccugcacgagaucgccagcgggggcgccccgcugagcaaggaggugggcgaggccguggccaagcgguuccaccucccgggcauccgccagggcuacggccugaccgagaccacgagcgcgauccugaucacccccgagggggacgacaagccgggcgccgugggcaagguggucccguucuucgaggccaaggugguggaccuggacaccggcaagacccugggcgugaaccagcggggcgagcugugcgugcgggggccgaugaucaugagcggcuacgugaacaacccggaggccaccaacgcccucaucgacaaggacggcuggcugcacagcggcgacaucgccuacugggacgaggacgagcacuucuucaucgucgaccggcugaagucgcugaucaaguacaagggcuaccagguggcgccggccgagcuggagagcauccugcuccagcaccccaacaucuucgacgccggcguggccgggcugccggacgacgacgccggcgagcugccggccgcggugguggugcuggagcacggcaagaccaugacggagaaggagaucgucgacuacguggccagccaggugaccaccgccaagaagcugcggggcggcgugguguucguggacgaggucccgaagggccugaccgggaagcucgacgcccggaagauccgcgagauccugaucaaggccaagaagggcggcaagaucgccgugugaggacuaguggaagcauuuuccuggcugauuaaaagaaauuacucagcuauggucaucuguuccuguuagaaggcuaugcagcauauuauauacuaugcgcauguuaugaaaugcauaauaaaaaauuuuaaaaaaucuaaaagaucuaaaaaaaaaaaaaaaaaaaaaaaaaaaaaaaaaaaaaaaaaaaaaaaaaaaaaaaaaaaaaaaagaauu

SEQ ID NO: 88 - RNA, 2014 nt, Artificial Sequence
  mRNA product HSD17B4_protein of interest example 5_Ndufa1_A64-C30-histoneSL
  misc_feature (78)..(1739): n is a, c, g, or u
gggagagucccgcagucggcguccagcggcucugcuuguucgugugugugucguugcaggccuuauucaagcuuaccnnnnnnnnnnnnnnnnnnnnnnnnnnnnnnnnnnnnnnnnnnnnnnnnnnnnnnnnnnnnnnnnnnnnnnnnnnnnnnnnnnnnnnnnnnnnnnnnnnnnnnnnnnnnnnnnnnnnnnnnnnnnnnnnnnnnnnnnnnnnnnnnnnnnnnnnnnnnnnnnnnnnnnnnnnnnnnnnnnnnnnnnnnnnnnnnnnnnnnnnnnnnnnnnnnnnnnnnnnnnnnnnnnnnnnnnnnnnnnnnnnnnnnnnnnnnnnnnnnnnnnnnnnnnnnnnnnnnnnnnnnnnnnnnnnnnnnnnnnnnnnnnnnnnnnnnnnnnnnnnnnnnnnnnnnnnnnnnnnnnnnnnnnnnnnnnnnnnnnnnnnnnnnnnnnnnnnnnnnnnnnnnnnnnnnnnnnnnnnnnnnnnnnnnnnnnnnnnnnnnnnnnnnnnnnnnnnnnnnnnnnnnnnnnnnnnnnnnnnnnnnnnnnnnnnnnnnnnnnnnnnnnnnnnnnnnnnnnnnnnnnnnnnnnnnnnnnnnnnnnnnnnnnnnnnnnnnnnnnnnnnnnnnnnnnnnnnnnnnnnnnnnnnnnnnnnnnnnnnnnnnnnnnnnnnnnnnnnnnnnnnnnnnnnnnnnnnnnnnnnnnnnnnnnnnnnnnnnnnnnnnnnnnnnnnnnnnnnnnnnnnnnnnnnnnnnnnnnnnnnnnnnnnnnnnnnnnnnnnnnnnnnnnnnnnnnnnnnnnnnnnnnnnnnnnnnnnnnnnnnnnnnnnnnnnnnnnnnnnnnnnnnnnnnnnnnnnnnnnnnnnnnnnnnnnnnnnnnnnnnnnnnnnnnnnnnnnnnnnnnnnnnnnnnnnnnnnnnnnnnnnnnnnnnnnnnnnnnnnnnnnnnnnnnnnnnnnnnnnnnnnnnnnnnnnnnnnnnnnnnnnnnnnnnnnnnnnnnnnnnnnnnnnnnnnnnnnnnnnnnnnnnnnnnnnnnnnnnnnnnnnnnnnnnnnnnnnnnnnnnnnnnnnnnnnnnnnnnnnnnnnnnnnnnnnnnnnnnnnnnnnnnnnnnnnnnnnnnnnnnnnnnnnnnnnnnnnnnnnnnnnnnnnnnnnnnnnnnnnnnnnnnnnnnnnnnnnnnnnnnnnnnnnnnnnnnnnnnnnnnnnnnnnnnnnnnnnnnnnnnnnnnnnnnnnnnnnnnnnnnnnnnnnnnnnnnnnnnnnnnnnnnnnnnnnnnnnnnnnnnnnnnnnnnnnnnnnnnnnnnnnnnnnnnnnnnnnnnnnnnnnnnnnnnnnnnnnnnnnnnnnnnnnnnnnnnnnnnnnnnnnnnnnnnnnnnnnnnnnnnnnnnnnnnnnnnnnnnnnnnnnnnnnnnnnnnnnnnnnnnnnnnnnnnnnnnnnnnnnnnnnnnnnnnnnnnnnnnnnnnnnnnnnnnnnnnnnnnnnnnnnnnnnnnnnnnnnnnnnnnnnnnnnnnnnnnnnnnnnnnnnnnnnnnnnnnnnnnnnnnnnnnnnnnnnnnnnnnnnnnnnnnnnnnnnnnnnnnnnnnnnnnnnnnnnnnnnnnnnnnnnnnnnnnnnnnnnnnnnnnnnnnnnnnnnnnnnnnnnnnnnnnnnnnnnnnnnnnnnnnnnnnnnnnnnnnnnnnnnnnnnnnnnnnnnnnnnnnnnnnnnnnnnnnnnnnnnnnnnnnnnnnnnnnnnnnnnnnnnnnnnggacuaguggaagcauuuuccuggcugauuaaaagaaauuacucagcuauggucaucuguuccuguuagaaggcuaugcagcauauuauauacuaugcgcauguuaugaaaugcauaauaaaaaauuuuaaaaaaucuaaaagaucuaaaaaaaaaaaaaaaaaaaaaaaaaaaaaaaaaaaaaaaaaaaaaaaaaaaaaaaaaaaaaaaaugcaucccccccccccccccccccccccccccccccaaaggcucuuuucagagccaccagaauu

SEQ ID NO: 89 - RNA, 1864 nt, Artificial Sequence
  mRNA product HSD17B4_RAV-G(GC)_RPS9_A64-C30-histoneSL
gggagagucccgcagucggcguccagcggcucugcuuguucgugugugugucguugcaggccuuauucaagcuuaccauggugccccaggcccuccuguucgucccgcugcugguguucccccucugcuucggcaaguuccccaucuacaccauccccgacaagcuggggccguggagccccaucgacauccaccaccuguccugccccaacaaccucguggucgaggacgagggcugcaccaaccugagcggguucuccuacauggagcugaaggugggcuacaucagcgccaucaagaugaacggguucacgugcaccggcguggucaccgaggcggagaccuacacgaacuucgugggcuacgugaccaccaccuucaagcggaagcacuuccgccccacgccggacgccugccgggccgccuacaacuggaagauggccggggacccccgcuacgaggagucccuccacaaccccuaccccgacuaccacuggcugcggaccgucaagaccaccaaggagagccuggugaucaucuccccgagcguggcggaccucgaccccuacgaccgcucccugcacagccgggucuuccccggcgggaacugcuccggcguggccgugagcuccacguacugcagcaccaaccacgacuacaccaucuggaugcccgagaacccgcgccuggggauguccugcgacaucuucaccaacagccggggcaagcgcgccuccaagggcagcgagacgugcggguucgucgacgagcggggccucuacaagucccugaagggggccugcaagcugaagcucugcggcgugcugggccugcgccucauggacgggaccuggguggcgaugcagaccagcaacgagaccaaguggugcccccccggccagcuggucaaccugcacgacuuccggagcgacgagaucgagcaccucgugguggaggagcuggucaagaagcgcgaggagugccuggacgcccucgaguccaucaugacgaccaagagcguguccuuccggcgccugagccaccuccggaagcuggugcccggguucggcaaggccuacaccaucuucaacaagacccugauggaggccgacgcccacuacaaguccguccgcacguggaacgagaucaucccgagcaaggggugccugcgggugggcggccgcugccacccccacgucaacgggguguucuucaacggcaucauccucgggcccgacggcaacgugcugauccccgagaugcaguccagccugcuccagcagcacauggagcugcuggucuccagcgugaucccgcucaugcacccccuggcggaccccuccaccguguucaagaacggggacgaggccgaggacuucgucgaggugcaccuccccgacgugcacgagcggaucagcggcgucgaccugggccugccgaacugggggaaguacgugcugcucuccgccggcgcccugaccgcccugaugcugaucaucuuccucaugaccugcuggcgccgggugaaccggagcgagcccacgcagcacaaccugcgcgggaccggccgggaggucuccgugaccccgcagagcgggaagaucaucuccagcugggaguccuacaagagcggcggcgagaccgggcugugaggacuaguguccaccugucccuccugggcugcuggauugucucguuuuccugccaaauaaacaggaucagcgcuuuacagaucuaaaaaaaaaaaaaaaaaaaaaaaaaaaaaaaaaaaaaaaaaaaaaaaaaaaaaaaaaaaaaaaaugcaucccccccccccccccccccccccccccccccaaaggcucuuuucagagccaccagaauu

SEQ ID NO: 90 - RNA, 1805 nt, Artificial Sequence
  mRNA product HSD17B4_RAV-G(GC)_RPS9_A64
gggagagucccgcagucggcguccagcggcucugcuuguucgugugugugucguugcaggccuuauucaagcuuaccauggugccccaggcccuccuguucgucccgcugcugguguucccccucugcuucggcaaguuccccaucuacaccauccccgacaagcuggggccguggagccccaucgacauccaccaccuguccugccccaacaaccucguggucgaggacgagggcugcaccaaccugagcggguucuccuacauggagcugaaggugggcuacaucagcgccaucaagaugaacggguucacgugcaccggcguggucaccgaggcggagaccuacacgaacuucgugggcuacgugaccaccaccuucaagcggaagcacuuccgccccacgccggacgccugccgggccgccuacaacuggaagauggccggggacccccgcuacgaggagucccuccacaaccccuaccccgacuaccacuggcugcggaccgucaagaccaccaaggagagccuggugaucaucuccccgagcguggcggaccucgaccccuacgaccgcucccugcacagccgggucuuccccggcgggaacugcuccggcguggccgugagcuccacguacugcagcaccaaccacgacuacaccaucuggaugcccgagaacccgcgccuggggauguccugcgacaucuucaccaacagccggggcaagcgcgccuccaagggcagcgagacgugcggguucgucgacgagcggggccucuacaagucccugaagggggccugcaagcugaagcucugcggcgugcugggccugcgccucauggacgggaccuggguggcgaugcagaccagcaacgagaccaaguggugcccccccggccagcuggucaaccugcacgacuuccggagcgacgagaucgagcaccucgugguggaggagcuggucaagaagcgcgaggagugccuggacgcccucgaguccaucaugacgaccaagagcguguccuuccggcgccugagccaccuccggaagcuggugcccggguucggcaaggccuacaccaucuucaacaagacccugauggaggccgacgcccacuacaaguccguccgcacguggaacgagaucaucccgagcaaggggugccugcgggugggcggccgcugccacccccacgucaacgggguguucuucaacggcaucauccucgggcccgacggcaacgugcugauccccgagaugcaguccagccugcuccagcagcacauggagcugcuggucuccagcgugaucccgcucaugcacccccuggcggaccccuccaccguguucaagaacggggacgaggccgaggacuucgucgaggugcaccuccccgacgugcacgagcggaucagcggcgucgaccugggccugccgaacugggggaaguacgugcugcucuccgccggcgcccugaccgcccugaugcugaucaucuuccucaugaccugcuggcgccgggugaaccggagcgagcccacgcagcacaaccugcgcgggaccggccgggaggucuccgugaccccgcagagcgggaagaucaucuccagcugggaguccuacaagagcggcggcgagaccgggcugugaggacuaguguccaccugucccuccugggcugcuggauugucucguuuuccugccaaauaaacaggaucagcgcuuuacagaucuaaaaaaaaaaaaaaaaaaaaaaaaaaaaaaaaaaaaaaaaaaaaaaaaaaaaaaaaaaaaaaaagaauu

SEQ ID NO: 91 - RNA, 871 nt, Artificial Sequence
  mRNA product HSD17B4_HsEPO(GC)_RPS9_A64-C30-histoneSL
gggagagucccgcagucggcguccagcggcucugcuuguucgugugugugucguugcaggccuuauucaagcuuaccaugggcgugcacgagugccccgccuggcuguggcuccugcugagccuccugucccugccgcucgggcugcccguccugggcgcccccccgcggcucaucugcgacagccgcgugcuggagcgguaccugcucgaggcgaaggaggccgagaacaucaccaccgggugcgccgagcacugcucccugaacgagaacaucacggugccggacaccaaggucaacuucuacgccuggaagcgcauggaggugggccagcaggccguggaggucuggcaggggcuggcgcuccugagcgaggccgugcugcggggccaggcccuccuggugaacuccagccagcccugggagccccugcagcuccacgucgacaaggccguguccggccugcgcagccugaccacccuccugcgggcgcugggggcccagaaggaggccaucucccccccggacgccgccagcgcggccccgcuccgcacgaucaccgccgacaccuuccggaagcuguuccgcguguacuccaacuuccugcggggcaagcucaagcuguacaccggggaggccugccgcacgggcgaccggugaggacuaguguccaccugucccuccugggcugcuggauugucucguuuuccugccaaauaaacaggaucagcgcuuuacagaucuaaaaaaaaaaaaaaaaaaaaaaaaaaaaaaaaaaaaaaaaaaaaaaaaaaaaaaaaaaaaaaaaugcaucccccccccccccccccccccccccccccccaaaggcucuuuucagagccaccagaauu

SEQ ID NO: 92 - RNA, 812 nt, Artificial Sequence
  mRNA product HSD17B4_HsEPO(GC)_RPS9_A64
gggagagucccgcagucggcguccagcggcucugcuuguucgugugugugucguugcaggccuuauucaagcuuaccaugggcgugcacgagugccccgccuggcuguggcuccugcugagccuccugucccugccgcucgggcugcccguccugggcgcccccccgcggcucaucugcgacagccgcgugcuggagcgguaccugcucgaggcgaaggaggccgagaacaucaccaccgggugcgccgagcacugcucccugaacgagaacaucacggugccggacaccaaggucaacuucuacgccuggaagcgcauggaggugggccagcaggccguggaggucuggcaggggcuggcgcuccugagcgaggccgugcugcggggccaggcccuccuggugaacuccagccagcccugggagccccugcagcuccacgucgacaaggccguguccggccugcgcagccugaccacccuccugcgggcgcugggggcccagaaggaggccaucucccccccggacgccgccagcgcggccccgcuccgcacgaucaccgccgacaccuuccggaagcuguuccgcguguacuccaacuuccugcggggcaagcucaagcuguacaccggggaggccugccgcacgggcgaccggugaggacuaguguccaccugucccuccugggcugcuggauugucucguuuuccugccaaauaaacaggaucagcgcuuuacagaucuaaaaaaaaaaaaaaaaaaaaaaaaaaaaaaaaaaaaaaaaaaaaaaaaaaaaaaaaaaaaaaaagaauu

SEQ ID NO: 93 - RNA, 1942 nt, Artificial Sequence
  mRNA product HSD17B4_PpLuc(GC)_RPS9_A64-C30-histoneSL
gggagagucccgcagucggcguccagcggcucugcuuguucgugugugugucguugcaggccuuauucaagcuuaccauggaggacgccaagaacaucaagaagggcccggcgcccuucuacccgcuggaggacgggaccgccggcgagcagcuccacaaggccaugaagcgguacgcccuggugccgggcacgaucgccuucaccgacgcccacaucgaggucgacaucaccuacgcggaguacuucgagaugagcgugcgccuggccgaggccaugaagcgguacggccugaacaccaaccaccggaucguggugugcucggagaacagccugcaguucuucaugccggugcugggcgcccucuucaucggcguggccgucgccccggcgaacgacaucuacaacgagcgggagcugcugaacagcauggggaucagccagccgaccgugguguucgugagcaagaagggccugcagaagauccugaacgugcagaagaagcugcccaucauccagaagaucaucaucauggacagcaagaccgacuaccagggcuuccagucgauguacacguucgugaccagccaccucccgccgggcuucaacgaguacgacuucgucccggagagcuucgaccgggacaagaccaucgcccugaucaugaacagcagcggcagcaccggccugccgaaggggguggcccugccgcaccggaccgccugcgugcgcuucucgcacgcccgggaccccaucuucggcaaccagaucaucccggacaccgccauccugagcguggugccguuccaccacggcuucggcauguucacgacccugggcuaccucaucugcggcuuccgggugguccugauguaccgguucgaggaggagcuguuccugcggagccugcaggacuacaagauccagagcgcgcugcucgugccgacccuguucagcuucuucgccaagagcacccugaucgacaaguacgaccugucgaaccugcacgagaucgccagcgggggcgccccgcugagcaaggaggugggcgaggccguggccaagcgguuccaccucccgggcauccgccagggcuacggccugaccgagaccacgagcgcgauccugaucacccccgagggggacgacaagccgggcgccgugggcaagguggucccguucuucgaggccaaggugguggaccuggacaccggcaagacccugggcgugaaccagcggggcgagcugugcgugcgggggccgaugaucaugagcggcuacgugaacaacccggaggccaccaacgcccucaucgacaaggacggcuggcugcacagcggcgacaucgccuacugggacgaggacgagcacuucuucaucgucgaccggcugaagucgcugaucaaguacaagggcuaccagguggcgccggccgagcuggagagcauccugcuccagcaccccaacaucuucgacgccggcguggccgggcugccggacgacgacgccggcgagcugccggccgcggugguggugcuggagcacggcaagaccaugacggagaaggagaucgucgacuacguggccagccaggugaccaccgccaagaagcugcggggcggcgugguguucguggacgaggucccgaagggccugaccgggaagcucgacgcccggaagauccgcgagauccugaucaaggccaagaagggcggcaagaucgccgugugaggacuaguguccaccugucccuccugggcugcuggauugucucguuuuccugccaaauaaacaggaucagcgcuuuacagaucuaaaaaaaaaaaaaaaaaaaaaaaaaaaaaaaaaaaaaaaaaaaaaaaaaaaaaaaaaaaaaaaaugcaucccccccccccccccccccccccccccccccaaaggcucuuuucagagccaccagaauu

SEQ ID NO: 94 - RNA, 1883 nt, Artificial Sequence
  mRNA product HSD17B4_PpLuc(GC)_RPS9_A64
gggagagucccgcagucggcguccagcggcucugcuuguucgugugugugucguugcaggccuuauucaagcuuaccauggaggacgccaagaacaucaagaagggcccggcgcccuucuacccgcuggaggacgggaccgccggcgagcagcuccacaaggccaugaagcgguacgcccuggugccgggcacgaucgccuucaccgacgcccacaucgaggucgacaucaccuacgcggaguacuucgagaugagcgugcgccuggccgaggccaugaagcgguacggccugaacaccaaccaccggaucguggugugcucggagaacagccugcaguucuucaugccggugcugggcgcccucuucaucggcguggccgucgccccggcgaacgacaucuacaacgagcgggagcugcugaacagcauggggaucagccagccgaccgugguguucgugagcaagaagggccugcagaagauccugaacgugcagaagaagcugcccaucauccagaagaucaucaucauggacagcaagaccgacuaccagggcuuccagucgauguacacguucgugaccagccaccucccgccgggcuucaacgaguacgacuucgucccggagagcuucgaccgggacaagaccaucgcccugaucaugaacagcagcggcagcaccggccugccgaaggggguggcccugccgcaccggaccgccugcgugcgcuucucgcacgcccgggaccccaucuucggcaaccagaucaucccggacaccgccauccugagcguggugccguuccaccacggcuucggcauguucacgacccugggcuaccucaucugcggcuuccgggugguccugauguaccgguucgaggaggagcuguuccugcggagccugcaggacuacaagauccagagcgcgcugcucgugccgacccuguucagcuucuucgccaagagcacccugaucgacaaguacgaccugucgaaccugcacgagaucgccagcgggggcgccccgcugagcaaggaggugggcgaggccguggccaagcgguuccaccucccgggcauccgccagggcuacggccugaccgagaccacgagcgcgauccugaucacccccgagggggacgacaagccgggcgccgugggcaagguggucccguucuucgaggccaaggugguggaccuggacaccggcaagacccugggcgugaaccagcggggcgagcugugcgugcgggggccgaugaucaugagcggcuacgugaacaacccggaggccaccaacgcccucaucgacaaggacggcuggcugcacagcggcgacaucgccuacugggacgaggacgagcacuucuucaucgucgaccggcugaagucgcugaucaaguacaagggcuaccagguggcgccggccgagcuggagagcauccugcuccagcaccccaacaucuucgacgccggcguggccgggcugccggacgacgacgccggcgagcugccggccgcggugguggugcuggagcacggcaagaccaugacggagaaggagaucgucgacuacguggccagccaggugaccaccgccaagaagcugcggggcggcgugguguucguggacgaggucccgaagggccugaccgggaagcucgacgcccggaagauccgcgagauccugaucaaggccaagaagggcggcaagaucgccgugugaggacuaguguccaccugucccuccugggcugcuggauugucucguuuuccugccaaauaaacaggaucagcgcuuuacagaucuaaaaaaaaaaaaaaaaaaaaaaaaaaaaaaaaaaaaaaaaaaaaaaaaaaaaaaaaaaaaaaaagaauu

SEQ ID NO: 95 - RNA, 1951 nt, Artificial Sequence
  mRNA product HSD17B4_protein of interest example 5_RPS9_A64-C30-histoneSL
  misc_feature (78)..(1739): n is a, c, g, or u
gggagagucccgcagucggcguccagcggcucugcuuguucgugugugugucguugcaggccuuauucaagcuuaccnnnnnnnnnnnnnnnnnnnnnnnnnnnnnnnnnnnnnnnnnnnnnnnnnnnnnnnnnnnnnnnnnnnnnnnnnnnnnnnnnnnnnnnnnnnnnnnnnnnnnnnnnnnnnnnnnnnnnnnnnnnnnnnnnnnnnnnnnnnnnnnnnnnnnnnnnnnnnnnnnnnnnnnnnnnnnnnnnnnnnnnnnnnnnnnnnnnnnnnnnnnnnnnnnnnnnnnnnnnnnnnnnnnnnnnnnnnnnnnnnnnnnnnnnnnnnnnnnnnnnnnnnnnnnnnnnnnnnnnnnnnnnnnnnnnnnnnnnnnnnnnnnnnnnnnnnnnnnnnnnnnnnnnnnnnnnnnnnnnnnnnnnnnnnnnnnnnnnnnnnnnnnnnnnnnnnnnnnnnnnnnnnnnnnnnnnnnnnnnnnnnnnnnnnnnnnnnnnnnnnnnnnnnnnnnnnnnnnnnnnnnnnnnnnnnnnnnnnnnnnnnnnnnnnnnnnnnnnnnnnnnnnnnnnnnnnnnnnnnnnnnnnnnnnnnnnnnnnnnnnnnnnnnnnnnnnnnnnnnnnnnnnnnnnnnnnnnnnnnnnnnnnnnnnnnnnnnnnnnnnnnnnnnnnnnnnnnnnnnnnnnnnnnnnnnnnnnnnnnnnnnnnnnnnnnnnnnnnnnnnnnnnnnnnnnnnnnnnnnnnnnnnnnnnnnnnnnnnnnnnnnnnnnnnnnnnnnnnnnnnnnnnnnnnnnnnnnnnnnnnnnnnnnnnnnnnnnnnnnnnnnnnnnnnnnnnnnnnnnnnnnnnnnnnnnnnnnnnnnnnnnnnnnnnnnnnnnnnnnnnnnnnnnnnnnnnnnnnnnnnnnnnnnnnnnnnnnnnnnnnnnnnnnnnnnnnnnnnnnnnnnnnnnnnnnnnnnnnnnnnnnnnnnnnnnnnnnnnnnnnnnnnnnnnnnnnnnnnnnnnnnnnnnnnnnnnnnnnnnnnnnnnnnnnnnnnnnnnnnnnnnnnnnnnnnnnnnnnnnnnnnnnnnnnnnnnnnnnnnnnnnnnnnnnnnnnnnnnnnnnnnnnnnnnnnnnnnnnnnnnnnnnnnnnnnnnnnnnnnnnnnnnnnnnnnnnnnnnnnnnnnnnnnnnnnnnnnnnnnnnnnnnnnnnnnnnnnnnnnnnnnnnnnnnnnnnnnnnnnnnnnnnnnnnnnnnnnnnnnnnnnnnnnnnnnnnnnnnnnnnnnnnnnnnnnnnnnnnnnnnnnnnnnnnnnnnnnnnnnnnnnnnnnnnnnnnnnnnnnnnnnnnnnnnnnnnnnnnnnnnnnnnnnnnnnnnnnnnnnnnnnnnnnnnnnnnnnnnnnnnnnnnnnnnnnnnnnnnnnnnnnnnnnnnnnnnnnnnnnnnnnnnnnnnnnnnnnnnnnnnnnnnnnnnnnnnnnnnnnnnnnnnnnnnnnnnnnnnnnnnnnnnnnnnnnnnnnnnnnnnnnnnnnnnnnnnnnnnnnnnnnnnnnnnnnnnnnnnnnnnnnnnnnnnnnnnnnnnnnnnnnnnnnnnnnnnnnnnnnnnnnnnnnnnnnnnnnnnnnnnnnnnnnnnnnnnnnnnnnnnnnnnnnnnnnnnnnnnnnnnnnnnnnnnnnnnnnnnnnnnnnnnnnnnnnnnnnnnnnnnnnnnnnnnnnnnnnnnnnnnnnnnnnnnnnnnnnnnnnnnnnnnnnnnnnnnnnnnnnnnnggacuaguguccaccugucccuccugggcugcuggauugucucguuuuccugccaaauaaacaggaucagcgcuuuacagaucuaaaaaaaaaaaaaaaaaaaaaaaaaaaaaaaaaaaaaaaaaaaaaaaaaaaaaaaaaaaaaaaaugcaucccccccccccccccccccccccccccccccaaaggcucuuuucagagccaccagaauu

SEQ ID NO: 96 - RNA, 1844 nt, Artificial Sequence
  mRNA product ASAH1_RAV-G(GC)_RPS9_A64-C30-histoneSL
gggagagccucugcuggaguccggggaguggcguuggcugcuagagcgaagcuuaccauggugccccaggcccuccuguucgucccgcugcugguguucccccucugcuucggcaaguuccccaucuacaccauccccgacaagcuggggccguggagccccaucgacauccaccaccuguccugccccaacaaccucguggucgaggacgagggcugcaccaaccugagcggguucuccuacauggagcugaaggugggcuacaucagcgccaucaagaugaacggguucacgugcaccggcguggucaccgaggcggagaccuacacgaacuucgugggcuacgugaccaccaccuucaagcggaagcacuuccgccccacgccggacgccugccgggccgccuacaacuggaagauggccggggacccccgcuacgaggagucccuccacaaccccuaccccgacuaccacuggcugcggaccgucaagaccaccaaggagagccuggugaucaucuccccgagcguggcggaccucgaccccuacgaccgcucccugcacagccgggucuuccccggcgggaacugcuccggcguggccgugagcuccacguacugcagcaccaaccacgacuacaccaucuggaugcccgagaacccgcgccuggggauguccugcgacaucuucaccaacagccggggcaagcgcgccuccaagggcagcgagacgugcggguucgucgacgagcggggccucuacaagucccugaagggggccugcaagcugaagcucugcggcgugcugggccugcgccucauggacgggaccuggguggcgaugcagaccagcaacgagaccaaguggugcccccccggccagcuggucaaccugcacgacuuccggagcgacgagaucgagcaccucgugguggaggagcuggucaagaagcgcgaggagugccuggacgcccucgaguccaucaugacgaccaagagcguguccuuccggcgccugagccaccuccggaagcuggugcccggguucggcaaggccuacaccaucuucaacaagacccugauggaggccgacgcccacuacaaguccguccgcacguggaacgagaucaucccgagcaaggggugccugcgggugggcggccgcugccacccccacgucaacgggguguucuucaacggcaucauccucgggcccgacggcaacgugcugauccccgagaugcaguccagccugcuccagcagcacauggagcugcuggucuccagcgugaucccgcucaugcacccccuggcggaccccuccaccguguucaagaacggggacgaggccgaggacuucgucgaggugcaccuccccgacgugcacgagcggaucagcggcgucgaccugggccugccgaacugggggaaguacgugcugcucuccgccggcgcccugaccgcccugaugcugaucaucuuccucaugaccugcuggcgccgggugaaccggagcgagcccacgcagcacaaccugcgcgggaccggccgggaggucuccgugaccccgcagagcgggaagaucaucuccagcugggaguccuacaagagcggcggcgagaccgggcugugaggacuaguguccaccugucccuccugggcugcuggauugucucguuuuccugccaaauaaacaggaucagcgcuuuacagaucuaaaaaaaaaaaaaaaaaaaaaaaaaaaaaaaaaaaaaaaaaaaaaaaaaaaaaaaaaaaaaaaaugcaucccccccccccccccccccccccccccccccaaaggcucuuuucagagccaccagaauu

SEQ ID NO: 97 - RNA, 1785 nt, Artificial Sequence
  mRNA product ASAH1_RAV-G(GC)_RPS9_A64
gggagagccucugcuggaguccggggaguggcguuggcugcuagagcgaagcuuaccauggugccccaggcccuccuguucgucccgcugcugguguucccccucugcuucggcaaguuccccaucuacaccauccccgacaagcuggggccguggagccccaucgacauccaccaccuguccugccccaacaaccucguggucgaggacgagggcugcaccaaccugagcggguucuccuacauggagcugaaggugggcuacaucagcgccaucaagaugaacggguucacgugcaccggcguggucaccgaggcggagaccuacacgaacuucgugggcuacgugaccaccaccuucaagcggaagcacuuccgccccacgccggacgccugccgggccgccuacaacuggaagauggccggggacccccgcuacgaggagucccuccacaaccccuaccccgacuaccacuggcugcggaccgucaagaccaccaaggagagccuggugaucaucuccccgagcguggcggaccucgaccccuacgaccgcucccugcacagccgggucuuccccggcgggaacugcuccggcguggccgugagcuccacguacugcagcaccaaccacgacuacaccaucuggaugcccgagaacccgcgccuggggauguccugcgacaucuucaccaacagccggggcaagcgcgccuccaagggcagcgagacgugcggguucgucgacgagcggggccucuacaagucccugaagggggccugcaagcugaagcucugcggcgugcugggccugcgccucauggacgggaccuggguggcgaugcagaccagcaacgagaccaaguggugcccccccggccagcuggucaaccugcacgacuuccggagcgacgagaucgagcaccucgugguggaggagcuggucaagaagcgcgaggagugccuggacgcccucgaguccaucaugacgaccaagagcguguccuuccggcgccugagccaccuccggaagcuggugcccggguucggcaaggccuacaccaucuucaacaagacccugauggaggccgacgcccacuacaaguccguccgcacguggaacgagaucaucccgagcaaggggugccugcgggugggcggccgcugccacccccacgucaacgggguguucuucaacggcaucauccucgggcccgacggcaacgugcugauccccgagaugcaguccagccugcuccagcagcacauggagcugcuggucuccagcgugaucccgcucaugcacccccuggcggaccccuccaccguguucaagaacggggacgaggccgaggacuucgucgaggugcaccuccccgacgugcacgagcggaucagcggcgucgaccugggccugccgaacugggggaaguacgugcugcucuccgccggcgcccugaccgcccugaugcugaucaucuuccucaugaccugcuggcgccgggugaaccggagcgagcccacgcagcacaaccugcgcgggaccggccgggaggucuccgugaccccgcagagcgggaagaucaucuccagcugggaguccuacaagagcggcggcgagaccgggcugugaggacuaguguccaccugucccuccugggcugcuggauugucucguuuuccugccaaauaaacaggaucagcgcuuuacagaucuaaaaaaaaaaaaaaaaaaaaaaaaaaaaaaaaaaaaaaaaaaaaaaaaaaaaaaaaaaaaaaaagaauu

SEQ ID NO: 98 - RNA, 851 nt, Artificial Sequence
  mRNA product ASAH1_HsEPO(GC)_RPS9_A64-C30-histoneSL
gggagagccucugcuggaguccggggaguggcguuggcugcuagagcgaagcuuaccaugggcgugcacgagugccccgccuggcuguggcuccugcugagccuccugucccugccgcucgggcugcccguccugggcgcccccccgcggcucaucugcgacagccgcgugcuggagcgguaccugcucgaggcgaaggaggccgagaacaucaccaccgggugcgccgagcacugcucccugaacgagaacaucacggugccggacaccaaggucaacuucuacgccuggaagcgcauggaggugggccagcaggccguggaggucuggcaggggcuggcgcuccugagcgaggccgugcugcggggccaggcccuccuggugaacuccagccagcccugggagccccugcagcuccacgucgacaaggccguguccggccugcgcagccugaccacccuccugcgggcgcugggggcccagaaggaggccaucucccccccggacgccgccagcgcggccccgcuccgcacgaucaccgccgacaccuuccggaagcuguuccgcguguacuccaacuuccugcggggcaagcucaagcuguacaccggggaggccugccgcacgggcgaccggugaggacuaguguccaccugucccuccugggcugcuggauugucucguuuuccugccaaauaaacaggaucagcgcuuuacagaucuaaaaaaaaaaaaaaaaaaaaaaaaaaaaaaaaaaaaaaaaaaaaaaaaaaaaaaaaaaaaaaaaugcaucccccccccccccccccccccccccccccccaaaggcucuuuucagagccaccagaauu

SEQ ID NO: 99 - RNA, 792 nt, Artificial Sequence
  mRNA product ASAH1_HsEPO(GC)_RPS9_A64
gggagagccucugcuggaguccggggaguggcguuggcugcuagagcgaagcuuaccaugggcgugcacgagugccccgccuggcuguggcuccugcugagccuccugucccugccgcucgggcugcccguccugggcgcccccccgcggcucaucugcgacagccgcgugcuggagcgguaccugcucgaggcgaaggaggccgagaacaucaccaccgggugcgccgagcacugcucccugaacgagaacaucacggugccggacaccaaggucaacuucuacgccuggaagcgcauggaggugggccagcaggccguggaggucuggcaggggcuggcgcuccugagcgaggccgugcugcggggccaggcccuccuggugaacuccagccagcccugggagccccugcagcuccacgucgacaaggccguguccggccugcgcagccugaccacccuccugcgggcgcugggggcccagaaggaggccaucucccccccggacgccgccagcgcggccccgcuccgcacgaucaccgccgacaccuuccggaagcuguuccgcguguacuccaacuuccugcggggcaagcucaagcuguacaccggggaggccugccgcacgggcgaccggugaggacuaguguccaccugucccuccugggcugcuggauugucucguuuuccugccaaauaaacaggaucagcgcuuuacagaucuaaaaaaaaaaaaaaaaaaaaaaaaaaaaaaaaaaaaaaaaaaaaaaaaaaaaaaaaaaaaaaaagaauu

SEQ ID NO: 100 - RNA, 1922 nt, Artificial Sequence
  mRNA product ASAH1_PpLuc(GC)_RPS9_A64-C30-histoneSL
gggagagccucugcuggaguccggggaguggcguuggcugcuagagcgaagcuuaccauggaggacgccaagaacaucaagaagggcccggcgcccuucuacccgcuggaggacgggaccgccggcgagcagcuccacaaggccaugaagcgguacgcccuggugccgggcacgaucgccuucaccgacgcccacaucgaggucgacaucaccuacgcggaguacuucgagaugagcgugcgccuggccgaggccaugaagcgguacggccugaacaccaaccaccggaucguggugugcucggagaacagccugcaguucuucaugccggugcugggcgcccucuucaucggcguggccgucgccccggcgaacgacaucuacaacgagcgggagcugcugaacagcauggggaucagccagccgaccgugguguucgugagcaagaagggccugcagaagauccugaacgugcagaagaagcugcccaucauccagaagaucaucaucauggacagcaagaccgacuaccagggcuuccagucgauguacacguucgugaccagccaccucccgccgggcuucaacgaguacgacuucgucccggagagcuucgaccgggacaagaccaucgcccugaucaugaacagcagcggcagcaccggccugccgaaggggguggcccugccgcaccggaccgccugcgugcgcuucucgcacgcccgggaccccaucuucggcaaccagaucaucccggacaccgccauccugagcguggugccguuccaccacggcuucggcauguucacgacccugggcuaccucaucugcggcuuccgggugguccugauguaccgguucgaggaggagcuguuccugcggagccugcaggacuacaagauccagagcgcgcugcucgugccgacccuguucagcuucuucgccaagagcacccugaucgacaaguacgaccugucgaaccugcacgagaucgccagcgggggcgccccgcugagcaaggaggugggcgaggccguggccaagcgguuccaccucccgggcauccgccagggcuacggccugaccgagaccacgagcgcgauccugaucacccccgagggggacgacaagccgggcgccgugggcaagguggucccguucuucgaggccaaggugguggaccuggacaccggcaagacccugggcgugaaccagcggggcgagcugugcgugcgggggccgaugaucaugagcggcuacgugaacaacccggaggccaccaacgcccucaucgacaaggacggcuggcugcacagcggcgacaucgccuacugggacgaggacgagcacuucuucaucgucgaccggcugaagucgcugaucaaguacaagggcuaccagguggcgccggccgagcuggagagcauccugcuccagcaccccaacaucuucgacgccggcguggccgggcugccggacgacgacgccggcgagcugccggccgcggugguggugcuggagcacggcaagaccaugacggagaaggagaucgucgacuacguggccagccaggugaccaccgccaagaagcugcggggcggcgugguguucguggacgaggucccgaagggccugaccgggaagcucgacgcccggaagauccgcgagauccugaucaaggccaagaagggcggcaagaucgccgugugaggacuaguguccaccugucccuccugggcugcuggauugucucguuuuccugccaaauaaacaggaucagcgcuuuacagaucuaaaaaaaaaaaaaaaaaaaaaaaaaaaaaaaaaaaaaaaaaaaaaaaaaaaaaaaaaaaaaaaaugcaucccccccccccccccccccccccccccccccaaaggcucuuuucagagccaccagaauu

SEQ ID NO: 101 - RNA, 1863 nt, Artificial Sequence
  mRNA product ASAH1_PpLuc(GC)_RPS9_A64
gggagagccucugcuggaguccggggaguggcguuggcugcuagagcgaagcuuaccauggaggacgccaagaacaucaagaagggcccggcgcccuucuacccgcuggaggacgggaccgccggcgagcagcuccacaaggccaugaagcgguacgcccuggugccgggcacgaucgccuucaccgacgcccacaucgaggucgacaucaccuacgcggaguacuucgagaugagcgugcgccuggccgaggccaugaagcgguacggccugaacaccaaccaccggaucguggugugcucggagaacagccugcaguucuucaugccggugcugggcgcccucuucaucggcguggccgucgccccggcgaacgacaucuacaacgagcgggagcugcugaacagcauggggaucagccagccgaccgugguguucgugagcaagaagggccugcagaagauccugaacgugcagaagaagcugcccaucauccagaagaucaucaucauggacagcaagaccgacuaccagggcuuccagucgauguacacguucgugaccagccaccucccgccgggcuucaacgaguacgacuucgucccggagagcuucgaccgggacaagaccaucgcccugaucaugaacagcagcggcagcaccggccugccgaaggggguggcccugccgcaccggaccgccugcgugcgcuucucgcacgcccgggaccccaucuucggcaaccagaucaucccggacaccgccauccugagcguggugccguuccaccacggcuucggcauguucacgacccugggcuaccucaucugcggcuuccgggugguccugauguaccgguucgaggaggagcuguuccugcggagccugcaggacuacaagauccagagcgcgcugcucgugccgacccuguucagcuucuucgccaagagcacccugaucgacaaguacgaccugucgaaccugcacgagaucgccagcgggggcgccccgcugagcaaggaggugggcgaggccguggccaagcgguuccaccucccgggcauccgccagggcuacggccugaccgagaccacgagcgcgauccugaucacccccgagggggacgacaagccgggcgccgugggcaagguggucccguucuucgaggccaaggugguggaccuggacaccggcaagacccugggcgugaaccagcggggcgagcugugcgugcgggggccgaugaucaugagcggcuacgugaacaacccggaggccaccaacgcccucaucgacaaggacggcuggcugcacagcggcgacaucgccuacugggacgaggacgagcacuucuucaucgucgaccggcugaagucgcugaucaaguacaagggcuaccagguggcgccggccgagcuggagagcauccugcuccagcaccccaacaucuucgacgccggcguggccgggcugccggacgacgacgccggcgagcugccggccgcggugguggugcuggagcacggcaagaccaugacggagaaggagaucgucgacuacguggccagccaggugaccaccgccaagaagcugcggggcggcgugguguucguggacgaggucccgaagggccugaccgggaagcucgacgcccggaagauccgcgagauccugaucaaggccaagaagggcggcaagaucgccgugugaggacuaguguccaccugucccuccugggcugcuggauugucucguuuuccugccaaauaaacaggaucagcgcuuuacagaucuaaaaaaaaaaaaaaaaaaaaaaaaaaaaaaaaaaaaaaaaaaaaaaaaaaaaaaaaaaaaaaaagaauu

SEQ ID NO: 102 - RNA, 1931 nt, Artificial Sequence
  mRNA product ASAH1_protein of interest example 5_RPS9_A64-C30-histoneSL
  misc_feature (58)..(1719): n is a, c, g, or u
gggagagccucugcuggaguccggggaguggcguuggcugcuagagcgaagcuuaccnnnnnnnnnnnnnnnnnnnnnnnnnnnnnnnnnnnnnnnnnnnnnnnnnnnnnnnnnnnnnnnnnnnnnnnnnnnnnnnnnnnnnnnnnnnnnnnnnnnnnnnnnnnnnnnnnnnnnnnnnnnnnnnnnnnnnnnnnnnnnnnnnnnnnnnnnnnnnnnnnnnnnnnnnnnnnnnnnnnnnnnnnnnnnnnnnnnnnnnnnnnnnnnnnnnnnnnnnnnnnnnnnnnnnnnnnnnnnnnnnnnnnnnnnnnnnnnnnnnnnnnnnnnnnnnnnnnnnnnnnnnnnnnnnnnnnnnnnnnnnnnnnnnnnnnnnnnnnnnnnnnnnnnnnnnnnnnnnnnnnnnnnnnnnnnnnnnnnnnnnnnnnnnnnnnnnnnnnnnnnnnnnnnnnnnnnnnnnnnnnnnnnnnnnnnnnnnnnnnnnnnnnnnnnnnnnnnnnnnnnnnnnnnnnnnnnnnnnnnnnnnnnnnnnnnnnnnnnnnnnnnnnnnnnnnnnnnnnnnnnnnnnnnnnnnnnnnnnnnnnnnnnnnnnnnnnnnnnnnnnnnnnnnnnnnnnnnnnnnnnnnnnnnnnnnnnnnnnnnnnnnnnnnnnnnnnnnnnnnnnnnnnnnnnnnnnnnnnnnnnnnnnnnnnnnnnnnnnnnnnnnnnnnnnnnnnnnnnnnnnnnnnnnnnnnnnnnnnnnnnnnnnnnnnnnnnnnnnnnnnnnnnnnnnnnnnnnnnnnnnnnnnnnnnnnnnnnnnnnnnnnnnnnnnnnnnnnnnnnnnnnnnnnnnnnnnnnnnnnnnnnnnnnnnnnnnnnnnnnnnnnnnnnnnnnnnnnnnnnnnnnnnnnnnnnnnnnnnnnnnnnnnnnnnnnnnnnnnnnnnnnnnnnnnnnnnnnnnnnnnnnnnnnnnnnnnnnnnnnnnnnnnnnnnnnnnnnnnnnnnnnnnnnnnnnnnnnnnnnnnnnnnnnnnnnnnnnnnnnnnnnnnnnnnnnnnnnnnnnnnnnnnnnnnnnnnnnnnnnnnnnnnnnnnnnnnnnnnnnnnnnnnnnnnnnnnnnnnnnnnnnnnnnnnnnnnnnnnnnnnnnnnnnnnnnnnnnnnnnnnnnnnnnnnnnnnnnnnnnnnnnnnnnnnnnnnnnnnnnnnnnnnnnnnnnnnnnnnnnnnnnnnnnnnnnnnnnnnnnnnnnnnnnnnnnnnnnnnnnnnnnnnnnnnnnnnnnnnnnnnnnnnnnnnnnnnnnnnnnnnnnnnnnnnnnnnnnnnnnnnnnnnnnnnnnnnnnnnnnnnnnnnnnnnnnnnnnnnnnnnnnnnnnnnnnnnnnnnnnnnnnnnnnnnnnnnnnnnnnnnnnnnnnnnnnnnnnnnnnnnnnnnnnnnnnnnnnnnnnnnnnnnnnnnnnnnnnnnnnnnnnnnnnnnnnnnnnnnnnnnnnnnnnnnnnnnnnnnnnnnnnnnnnnnnnnnnnnnnnnnnnnnnnnnnnnnnnnnnnnnnnnnnnnnnnnnnnnnnnnnnnnnnnnnnnnnnnnnnnnnnnnnnnnnnnnnnnnnnnnnnnnnnnnnnnnnnnnnnnnnnnnnnnnnnnnnnnnnnnnnnnnnnnnnnnnnnnnnnnnnnnnnnnnnnnnnnnnnnnnnnnnnnnnnnnnnnnnnnnnnnnnnnnnnnnnnnnnnnnnnnnnnnnnnnnnnnnnnnnnnnggacuaguguccaccugucccuccugggcugcuggauugucucguuuuccugccaaauaaacaggaucagcgcuuuacagaucuaaaaaaaaaaaaaaaaaaaaaaaaaaaaaaaaaaaaaaaaaaaaaaaaaaaaaaaaaaaaaaaaugcaucccccccccccccccccccccccccccccccaaaggcucuuuucagagccaccagaauu

SEQ ID NO: 103 - RNA, 1864 nt, Artificial Sequence
  mRNA product ATP5A1_RAV-G(GC)_PSMB3_A64-C30-histoneSL
gggagagcggcucggccauuuugucccagucaguccggaggcugcggcugcagaaguaccgccugcggaguaacugcaaagaagcuuaccauggugccccaggcccuccuguucgucccgcugcugguguucccccucugcuucggcaaguuccccaucuacaccauccccgacaagcuggggccguggagccccaucgacauccaccaccuguccugccccaacaaccucguggucgaggacgagggcugcaccaaccugagcggguucuccuacauggagcugaaggugggcuacaucagcgccaucaagaugaacggguucacgugcaccggcguggucaccgaggcggagaccuacacgaacuucgugggcuacgugaccaccaccuucaagcggaagcacuuccgccccacgccggacgccugccgggccgccuacaacuggaagauggccggggacccccgcuacgaggagucccuccacaaccccuaccccgacuaccacuggcugcggaccgucaagaccaccaaggagagccuggugaucaucuccccgagcguggcggaccucgaccccuacgaccgcucccugcacagccgggucuuccccggcgggaacugcuccggcguggccgugagcuccacguacugcagcaccaaccacgacuacaccaucuggaugcccgagaacccgcgccuggggauguccugcgacaucuucaccaacagccggggcaagcgcgccuccaagggcagcgagacgugcggguucgucgacgagcggggccucuacaagucccugaagggggccugcaagcugaagcucugcggcgugcugggccugcgccucauggacgggaccuggguggcgaugcagaccagcaacgagaccaaguggugcccccccggccagcuggucaaccugcacgacuuccggagcgacgagaucgagcaccucgugguggaggagcuggucaagaagcgcgaggagugccuggacgcccucgaguccaucaugacgaccaagagcguguccuuccggcgccugagccaccuccggaagcuggugcccggguucggcaaggccuacaccaucuucaacaagacccugauggaggccgacgcccacuacaaguccguccgcacguggaacgagaucaucccgagcaaggggugccugcgggugggcggccgcugccacccccacgucaacgggguguucuucaacggcaucauccucgggcccgacggcaacgugcugauccccgagaugcaguccagccugcuccagcagcacauggagcugcuggucuccagcgugaucccgcucaugcacccccuggcggaccccuccaccguguucaagaacggggacgaggccgaggacuucgucgaggugcaccuccccgacgugcacgagcggaucagcggcgucgaccugggccugccgaacugggggaaguacgugcugcucuccgccggcgcccugaccgcccugaugcugaucaucuuccucaugaccugcuggcgccgggugaaccggagcgagcccacgcagcacaaccugcgcgggaccggccgggaggucuccgugaccccgcagagcgggaagaucaucuccagcugggaguccuacaagagcggcggcgagaccgggcugugaggacuagucccuguucccagagcccacuuuuuuuucuuuuuuugaaauaaaauagccugucuuucagaucuaaaaaaaaaaaaaaaaaaaaaaaaaaaaaaaaaaaaaaaaaaaaaaaaaaaaaaaaaaaaaaaaugcaucccccccccccccccccccccccccccccccaaaggcucuuuucagagccaccagaauu

SEQ ID NO: 104 - RNA, 1805 nt, Artificial Sequence
  mRNA product ATP5A1_RAV-G(GC)_PSMB3_A64
gggagagcggcucggccauuuugucccagucaguccggaggcugcggcugcagaaguaccgccugcggaguaacugcaaagaagcuuaccauggugccccaggcccuccuguucgucccgcugcugguguucccccucugcuucggcaaguuccccaucuacaccauccccgacaagcuggggccguggagccccaucgacauccaccaccuguccugccccaacaaccucguggucgaggacgagggcugcaccaaccugagcggguucuccuacauggagcugaaggugggcuacaucagcgccaucaagaugaacggguucacgugcaccggcguggucaccgaggcggagaccuacacgaacuucgugggcuacgugaccaccaccuucaagcggaagcacuuccgccccacgccggacgccugccgggccgccuacaacuggaagauggccggggacccccgcuacgaggagucccuccacaaccccuaccccgacuaccacuggcugcggaccgucaagaccaccaaggagagccuggugaucaucuccccgagcguggcggaccucgaccccuacgaccgcucccugcacagccgggucuuccccggcgggaacugcuccggcguggccgugagcuccacguacugcagcaccaaccacgacuacaccaucuggaugcccgagaacccgcgccuggggauguccugcgacaucuucaccaacagccggggcaagcgcgccuccaagggcagcgagacgugcggguucgucgacgagcggggccucuacaagucccugaagggggccugcaagcugaagcucugcggcgugcugggccugcgccucauggacgggaccuggguggcgaugcagaccagcaacgagaccaaguggugcccccccggccagcuggucaaccugcacgacuuccggagcgacgagaucgagcaccucgugguggaggagcuggucaagaagcgcgaggagugccuggacgcccucgaguccaucaugacgaccaagagcguguccuuccggcgccugagccaccuccggaagcuggugcccggguucggcaaggccuacaccaucuucaacaagacccugauggaggccgacgcccacuacaaguccguccgcacguggaacgagaucaucccgagcaaggggugccugcgggugggcggccgcugccacccccacgucaacgggguguucuucaacggcaucauccucgggcccgacggcaacgugcugauccccgagaugcaguccagccugcuccagcagcacauggagcugcuggucuccagcgugaucccgcucaugcacccccuggcggaccccuccaccguguucaagaacggggacgaggccgaggacuucgucgaggugcaccuccccgacgugcacgagcggaucagcggcgucgaccugggccugccgaacugggggaaguacgugcugcucuccgccggcgcccugaccgcccugaugcugaucaucuuccucaugaccugcuggcgccgggugaaccggagcgagcccacgcagcacaaccugcgcgggaccggccgggaggucuccgugaccccgcagagcgggaagaucaucuccagcugggaguccuacaagagcggcggcgagaccgggcugugaggacuagucccuguucccagagcccacuuuuuuuucuuuuuuugaaauaaaauagccugucuuucagaucuaaaaaaaaaaaaaaaaaaaaaaaaaaaaaaaaaaaaaaaaaaaaaaaaaaaaaaaaaaaaaaaagaauu

SEQ ID NO: 105 - RNA, 871 nt, Artificial Sequence
  mRNA product ATP5A1_HsEPO(GC)_PSMB3_A64-C30-histoneSL
gggagagcggcucggccauuuugucccagucaguccggaggcugcggcugcagaaguaccgccugcggaguaacugcaaagaagcuuaccaugggcgugcacgagugccccgccuggcuguggcuccugcugagccuccugucccugccgcucgggcugcccguccugggcgcccccccgcggcucaucugcgacagccgcgugcuggagcgguaccugcucgaggcgaaggaggccgagaacaucaccaccgggugcgccgagcacugcucccugaacgagaacaucacggugccggacaccaaggucaacuucuacgccuggaagcgcauggaggugggccagcaggccguggaggucuggcaggggcuggcgcuccugagcgaggccgugcugcggggccaggcccuccuggugaacuccagccagcccugggagccccugcagcuccacgucgacaaggccguguccggccugcgcagccugaccacccuccugcgggcgcugggggcccagaaggaggccaucucccccccggacgccgccagcgcggccccgcuccgcacgaucaccgccgacaccuuccggaagcuguuccgcguguacuccaacuuccugcggggcaagcucaagcuguacaccggggaggccugccgcacgggcgaccggugaggacuagucccuguucccagagcccacuuuuuuuucuuuuuuugaaauaaaauagccugucuuucagaucuaaaaaaaaaaaaaaaaaaaaaaaaaaaaaaaaaaaaaaaaaaaaaaaaaaaaaaaaaaaaaaaaugcaucccccccccccccccccccccccccccccccaaaggcucuuuucagagccaccagaauu

SEQ ID NO: 106 - RNA, 812 nt, Artificial Sequence
  mRNA product ATP5A1_HsEPO(GC)_PSMB3_A64
gggagagcggcucggccauuuugucccagucaguccggaggcugcggcugcagaaguaccgccugcggaguaacugcaaagaagcuuaccaugggcgugcacgagugccccgccuggcuguggcuccugcugagccuccugucccugccgcucgggcugcccguccugggcgcccccccgcggcucaucugcgacagccgcgugcuggagcgguaccugcucgaggcgaaggaggccgagaacaucaccaccgggugcgccgagcacugcucccugaacgagaacaucacggugccggacaccaaggucaacuucuacgccuggaagcgcauggaggugggccagcaggccguggaggucuggcaggggcuggcgcuccugagcgaggccgugcugcggggccaggcccuccuggugaacuccagccagcccugggagccccugcagcuccacgucgacaaggccguguccggccugcgcagccugaccacccuccugcgggcgcugggggcccagaaggaggccaucucccccccggacgccgccagcgcggccccgcuccgcacgaucaccgccgacaccuuccggaagcuguuccgcguguacuccaacuuccugcggggcaagcucaagcuguacaccggggaggccugccgcacgggcgaccggugaggacuagucccuguucccagagcccacuuuuuuuucuuuuuuugaaauaaaauagccugucuuucagaucuaaaaaaaaaaaaaaaaaaaaaaaaaaaaaaaaaaaaaaaaaaaaaaaaaaaaaaaaaaaaaaaagaauu

SEQ ID NO: 107 - RNA, 1942 nt, Artificial Sequence
  mRNA product ATP5A1_PpLuc(GC)_PSMB3_A64-C30-histoneSL
gggagagcggcucggccauuuugucccagucaguccggaggcugcggcugcagaaguaccgccugcggaguaacugcaaagaagcuuaccauggaggacgccaagaacaucaagaagggcccggcgcccuucuacccgcuggaggacgggaccgccggcgagcagcuccacaaggccaugaagcgguacgcccuggugccgggcacgaucgccuucaccgacgcccacaucgaggucgacaucaccuacgcggaguacuucgagaugagcgugcgccuggccgaggccaugaagcgguacggccugaacaccaaccaccggaucguggugugcucggagaacagccugcaguucuucaugccggugcugggcgcccucuucaucggcguggccgucgccccggcgaacgacaucuacaacgagcgggagcugcugaacagcauggggaucagccagccgaccgugguguucgugagcaagaagggccugcagaagauccugaacgugcagaagaagcugcccaucauccagaagaucaucaucauggacagcaagaccgacuaccagggcuuccagucgauguacacguucgugaccagccaccucccgccgggcuucaacgaguacgacuucgucccggagagcuucgaccgggacaagaccaucgcccugaucaugaacagcagcggcagcaccggccugccgaaggggguggcccugccgcaccggaccgccugcgugcgcuucucgcacgcccgggaccccaucuucggcaaccagaucaucccggacaccgccauccugagcguggugccguuccaccacggcuucggcauguucacgacccugggcuaccucaucugcggcuuccgggugguccugauguaccgguucgaggaggagcuguuccugcggagccugcaggacuacaagauccagagcgcgcugcucgugccgacccuguucagcuucuucgccaagagcacccugaucgacaaguacgaccugucgaaccugcacgagaucgccagcgggggcgccccgcugagcaaggaggugggcgaggccguggccaagcgguuccaccucccgggcauccgccagggcuacggccugaccgagaccacgagcgcgauccugaucacccccgagggggacgacaagccgggcgccgugggcaagguggucccguucuucgaggccaaggugguggaccuggacaccggcaagacccugggcgugaaccagcggggcgagcugugcgugcgggggccgaugaucaugagcggcuacgugaacaacccggaggccaccaacgcccucaucgacaaggacggcuggcugcacagcggcgacaucgccuacugggacgaggacgagcacuucuucaucgucgaccggcugaagucgcugaucaaguacaagggcuaccagguggcgccggccgagcuggagagcauccugcuccagcaccccaacaucuucgacgccggcguggccgggcugccggacgacgacgccggcgagcugccggccgcggugguggugcuggagcacggcaagaccaugacggagaaggagaucgucgacuacguggccagccaggugaccaccgccaagaagcugcggggcggcgugguguucguggacgaggucccgaagggccugaccgggaagcucgacgcccggaagauccgcgagauccugaucaaggccaagaagggcggcaagaucgccgugugaggacuagucccuguucccagagcccacuuuuuuuucuuuuuuugaaauaaaauagccugucuuucagaucuaaaaaaaaaaaaaaaaaaaaaaaaaaaaaaaaaaaaaaaaaaaaaaaaaaaaaaaaaaaaaaaaugcaucccccccccccccccccccccccccccccccaaaggcucuuuucagagccaccagaauu

SEQ ID NO: 108 - RNA, 1883 nt, Artificial Sequence
  mRNA product ATP5A1_PpLuc(GC)_PSMB3_A64
gggagagcggcucggccauuuugucccagucaguccggaggcugcggcugcagaaguaccgccugcggaguaacugcaaagaagcuuaccauggaggacgccaagaacaucaagaagggcccggcgcccuucuacccgcuggaggacgggaccgccggcgagcagcuccacaaggccaugaagcgguacgcccuggugccgggcacgaucgccuucaccgacgcccacaucgaggucgacaucaccuacgcggaguacuucgagaugagcgugcgccuggccgaggccaugaagcgguacggccugaacaccaaccaccggaucguggugugcucggagaacagccugcaguucuucaugccggugcugggcgcccucuucaucggcguggccgucgccccggcgaacgacaucuacaacgagcgggagcugcugaacagcauggggaucagccagccgaccgugguguucgugagcaagaagggccugcagaagauccugaacgugcagaagaagcugcccaucauccagaagaucaucaucauggacagcaagaccgacuaccagggcuuccagucgauguacacguucgugaccagccaccucccgccgggcuucaacgaguacgacuucgucccggagagcuucgaccgggacaagaccaucgcccugaucaugaacagcagcggcagcaccggccugccgaaggggguggcccugccgcaccggaccgccugcgugcgcuucucgcacgcccgggaccccaucuucggcaaccagaucaucccggacaccgccauccugagcguggugccguuccaccacggcuucggcauguucacgacccugggcuaccucaucugcggcuuccgggugguccugauguaccgguucgaggaggagcuguuccugcggagccugcaggacuacaagauccagagcgcgcugcucgugccgacccuguucagcuucuucgccaagagcacccugaucgacaaguacgaccugucgaaccugcacgagaucgccagcgggggcgccccgcugagcaaggaggugggcgaggccguggccaagcgguuccaccucccgggcauccgccagggcuacggccugaccgagaccacgagcgcgauccugaucacccccgagggggacgacaagccgggcgccgugggcaagguggucccguucuucgaggccaaggugguggaccuggacaccggcaagacccugggcgugaaccagcggggcgagcugugcgugcgggggccgaugaucaugagcggcuacgugaacaacccggaggccaccaacgcccucaucgacaaggacggcuggcugcacagcggcgacaucgccuacugggacgaggacgagcacuucuucaucgucgaccggcugaagucgcugaucaaguacaagggcuaccagguggcgccggccgagcuggagagcauccugcuccagcaccccaacaucuucgacgccggcguggccgggcugccggacgacgacgccggcgagcugccggccgcggugguggugcuggagcacggcaagaccaugacggagaaggagaucgucgacuacguggccagccaggugaccaccgccaagaagcugcggggcggcgugguguucguggacgaggucccgaagggccugaccgggaagcucgacgcccggaagauccgcgagauccugaucaaggccaagaagggcggcaagaucgccgugugaggacuagucccuguucccagagcccacuuuuuuuucuuuuuuugaaauaaaauagccugucuuucagaucuaaaaaaaaaaaaaaaaaaaaaaaaaaaaaaaaaaaaaaaaaaaaaaaaaaaaaaaaaaaaaaaagaauu

SEQ ID NO: 109 - RNA, 1951 nt, Artificial Sequence
  mRNA product ATP5A1_protein of interest example 5_PSMB3_A64-C30-histoneSL
  misc_feature (91)..(1752): n is a, c, g, or u
gggagagcggcucggccauuuugucccagucaguccggaggcugcggcugcagaaguaccgccugcggaguaacugcaaagaagcuuaccnnnnnnnnnnnnnnnnnnnnnnnnnnnnnnnnnnnnnnnnnnnnnnnnnnnnnnnnnnnnnnnnnnnnnnnnnnnnnnnnnnnnnnnnnnnnnnnnnnnnnnnnnnnnnnnnnnnnnnnnnnnnnnnnnnnnnnnnnnnnnnnnnnnnnnnnnnnnnnnnnnnnnnnnnnnnnnnnnnnnnnnnnnnnnnnnnnnnnnnnnnnnnnnnnnnnnnnnnnnnnnnnnnnnnnnnnnnnnnnnnnnnnnnnnnnnnnnnnnnnnnnnnnnnnnnnnnnnnnnnnnnnnnnnnnnnnnnnnnnnnnnnnnnnnnnnnnnnnnnnnnnnnnnnnnnnnnnnnnnnnnnnnnnnnnnnnnnnnnnnnnnnnnnnnnnnnnnnnnnnnnnnnnnnnnnnnnnnnnnnnnnnnnnnnnnnnnnnnnnnnnnnnnnnnnnnnnnnnnnnnnnnnnnnnnnnnnnnnnnnnnnnnnnnnnnnnnnnnnnnnnnnnnnnnnnnnnnnnnnnnnnnnnnnnnnnnnnnnnnnnnnnnnnnnnnnnnnnnnnnnnnnnnnnnnnnnnnnnnnnnnnnnnnnnnnnnnnnnnnnnnnnnnnnnnnnnnnnnnnnnnnnnnnnnnnnnnnnnnnnnnnnnnnnnnnnnnnnnnnnnnnnnnnnnnnnnnnnnnnnnnnnnnnnnnnnnnnnnnnnnnnnnnnnnnnnnnnnnnnnnnnnnnnnnnnnnnnnnnnnnnnnnnnnnnnnnnnnnnnnnnnnnnnnnnnnnnnnnnnnnnnnnnnnnnnnnnnnnnnnnnnnnnnnnnnnnnnnnnnnnnnnnnnnnnnnnnnnnnnnnnnnnnnnnnnnnnnnnnnnnnnnnnnnnnnnnnnnnnnnnnnnnnnnnnnnnnnnnnnnnnnnnnnnnnnnnnnnnnnnnnnnnnnnnnnnnnnnnnnnnnnnnnnnnnnnnnnnnnnnnnnnnnnnnnnnnnnnnnnnnnnnnnnnnnnnnnnnnnnnnnnnnnnnnnnnnnnnnnnnnnnnnnnnnnnnnnnnnnnnnnnnnnnnnnnnnnnnnnnnnnnnnnnnnnnnnnnnnnnnnnnnnnnnnnnnnnnnnnnnnnnnnnnnnnnnnnnnnnnnnnnnnnnnnnnnnnnnnnnnnnnnnnnnnnnnnnnnnnnnnnnnnnnnnnnnnnnnnnnnnnnnnnnnnnnnnnnnnnnnnnnnnnnnnnnnnnnnnnnnnnnnnnnnnnnnnnnnnnnnnnnnnnnnnnnnnnnnnnnnnnnnnnnnnnnnnnnnnnnnnnnnnnnnnnnnnnnnnnnnnnnnnnnnnnnnnnnnnnnnnnnnnnnnnnnnnnnnnnnnnnnnnnnnnnnnnnnnnnnnnnnnnnnnnnnnnnnnnnnnnnnnnnnnnnnnnnnnnnnnnnnnnnnnnnnnnnnnnnnnnnnnnnnnnnnnnnnnnnnnnnnnnnnnnnnnnnnnnnnnnnnnnnnnnnnnnnnnnnnnnnnnnnnnnnnnnnnnnnnnnnnnnnnnnnnnnnnnnnnnnnnnnnnnnnnnnnnnnnnnnnnnnnnnnnnnnnnnnnnnnnnnnnnnnnnnnnnnnnnnnnnnnnnnnnnnnnnnnnnnnnnnnnnnnnnnnnnnnnnnnnnnnnnnnnnnnnnnnnnnnnnnnnnnnnnnnnnnnnnnnnnnnnnnnnnnnnnnnnnnnnggacuagucccuguucccagagcccacuuuuuuuucuuuuuuugaaauaaaauagccugucuuucagaucuaaaaaaaaaaaaaaaaaaaaaaaaaaaaaaaaaaaaaaaaaaaaaaaaaaaaaaaaaaaaaaaaugcaucccccccccccccccccccccccccccccccaaaggcucuuuucagagccaccagaauu

SEQ ID NO: 110 - RNA, 1928 nt, Artificial Sequence
  mRNA product ATP5A1_RAV-G(GC)_CASP1_A64-C30-histoneSL
gggagagcggcucggccauuuugucccagucaguccggaggcugcggcugcagaaguaccgccugcggaguaacugcaaagaagcuuaccauggugccccaggcccuccuguucgucccgcugcugguguucccccucugcuucggcaaguuccccaucuacaccauccccgacaagcuggggccguggagccccaucgacauccaccaccuguccugccccaacaaccucguggucgaggacgagggcugcaccaaccugagcggguucuccuacauggagcugaaggugggcuacaucagcgccaucaagaugaacggguucacgugcaccggcguggucaccgaggcggagaccuacacgaacuucgugggcuacgugaccaccaccuucaagcggaagcacuuccgccccacgccggacgccugccgggccgccuacaacuggaagauggccggggacccccgcuacgaggagucccuccacaaccccuaccccgacuaccacuggcugcggaccgucaagaccaccaaggagagccuggugaucaucuccccgagcguggcggaccucgaccccuacgaccgcucccugcacagccgggucuuccccggcgggaacugcuccggcguggccgugagcuccacguacugcagcaccaaccacgacuacaccaucuggaugcccgagaacccgcgccuggggauguccugcgacaucuucaccaacagccggggcaagcgcgccuccaagggcagcgagacgugcggguucgucgacgagcggggccucuacaagucccugaagggggccugcaagcugaagcucugcggcgugcugggccugcgccucauggacgggaccuggguggcgaugcagaccagcaacgagaccaaguggugcccccccggccagcuggucaaccugcacgacuuccggagcgacgagaucgagcaccucgugguggaggagcuggucaagaagcgcgaggagugccuggacgcccucgaguccaucaugacgaccaagagcguguccuuccggcgccugagccaccuccggaagcuggugcccggguucggcaaggccuacaccaucuucaacaagacccugauggaggccgacgcccacuacaaguccguccgcacguggaacgagaucaucccgagcaaggggugccugcgggugggcggccgcugccacccccacgucaacgggguguucuucaacggcaucauccucgggcccgacggcaacgugcugauccccgagaugcaguccagccugcuccagcagcacauggagcugcuggucuccagcgugaucccgcucaugcacccccuggcggaccccuccaccguguucaagaacggggacgaggccgaggacuucgucgaggugcaccuccccgacgugcacgagcggaucagcggcgucgaccugggccugccgaacugggggaaguacgugcugcucuccgccggcgcccugaccgcccugaugcugaucaucuuccucaugaccugcuggcgccgggugaaccggagcgagcccacgcagcacaaccugcgcgggaccggccgggaggucuccgugaccccgcagagcgggaagaucaucuccagcugggaguccuacaagagcggcggcgagaccgggcugugaggacuaguaauaaggaaacuguaugaaugucugugggcaggaagugaagagauccuucuguaaagguuuuuggaauuaugucugcugaauaauaaacuuuuuugaaauaauaaaucugguagaaaaaugagaucuaaaaaaaaaaaaaaaaaaaaaaaaaaaaaaaaaaaaaaaaaaaaaaaaaaaaaaaaaaaaaaaaugcaucccccccccccccccccccccccccccccccaaaggcucuuuucagagccaccagaauu

SEQ ID NO: 111 - RNA, 1869 nt, Artificial Sequence
  mRNA product ATP5A1_RAV-G(GC)_CASP1_A64
gggagagcggcucggccauuuugucccagucaguccggaggcugcggcugcagaaguaccgccugcggaguaacugcaaagaagcuuaccauggugccccaggcccuccuguucgucccgcugcugguguucccccucugcuucggcaaguuccccaucuacaccauccccgacaagcuggggccguggagccccaucgacauccaccaccuguccugccccaacaaccucguggucgaggacgagggcugcaccaaccugagcggguucuccuacauggagcugaaggugggcuacaucagcgccaucaagaugaacggguucacgugcaccggcguggucaccgaggcggagaccuacacgaacuucgugggcuacgugaccaccaccuucaagcggaagcacuuccgccccacgccggacgccugccgggccgccuacaacuggaagauggccggggacccccgcuacgaggagucccuccacaaccccuaccccgacuaccacuggcugcggaccgucaagaccaccaaggagagccuggugaucaucuccccgagcguggcggaccucgaccccuacgaccgcucccugcacagccgggucuuccccggcgggaacugcuccggcguggccgugagcuccacguacugcagcaccaaccacgacuacaccaucuggaugcccgagaacccgcgccuggggauguccugcgacaucuucaccaacagccggggcaagcgcgccuccaagggcagcgagacgugcggguucgucgacgagcggggccucuacaagucccugaagggggccugcaagcugaagcucugcggcgugcugggccugcgccucauggacgggaccuggguggcgaugcagaccagcaacgagaccaaguggugcccccccggccagcuggucaaccugcacgacuuccggagcgacgagaucgagcaccucgugguggaggagcuggucaagaagcgcgaggagugccuggacgcccucgaguccaucaugacgaccaagagcguguccuuccggcgccugagccaccuccggaagcuggugcccggguucggcaaggccuacaccaucuucaacaagacccugauggaggccgacgcccacuacaaguccguccgcacguggaacgagaucaucccgagcaaggggugccugcgggugggcggccgcugccacccccacgucaacgggguguucuucaacggcaucauccucgggcccgacggcaacgugcugauccccgagaugcaguccagccugcuccagcagcacauggagcugcuggucuccagcgugaucccgcucaugcacccccuggcggaccccuccaccguguucaagaacggggacgaggccgaggacuucgucgaggugcaccuccccgacgugcacgagcggaucagcggcgucgaccugggccugccgaacugggggaaguacgugcugcucuccgccggcgcccugaccgcccugaugcugaucaucuuccucaugaccugcuggcgccgggugaaccggagcgagcccacgcagcacaaccugcgcgggaccggccgggaggucuccgugaccccgcagagcgggaagaucaucuccagcugggaguccuacaagagcggcggcgagaccgggcugugaggacuaguaauaaggaaacuguaugaaugucugugggcaggaagugaagagauccuucuguaaagguuuuuggaauuaugucugcugaauaauaaacuuuuuugaaauaauaaaucugguagaaaaaugagaucuaaaaaaaaaaaaaaaaaaaaaaaaaaaaaaaaaaaaaaaaaaaaaaaaaaaaaaaaaaaaaaaagaauu

SEQ ID NO: 112 - RNA, 935 nt, Artificial Sequence
  mRNA product ATP5A1_HsEPO(GC)_CASP1_A64-C30-histoneSL
gggagagcggcucggccauuuugucccagucaguccggaggcugcggcugcagaaguaccgccugcggaguaacugcaaagaagcuuaccaugggcgugcacgagugccccgccuggcuguggcuccugcugagccuccugucccugccgcucgggcugcccguccugggcgcccccccgcggcucaucugcgacagccgcgugcuggagcgguaccugcucgaggcgaaggaggccgagaacaucaccaccgggugcgccgagcacugcucccugaacgagaacaucacggugccggacaccaaggucaacuucuacgccuggaagcgcauggaggugggccagcaggccguggaggucuggcaggggcuggcgcuccugagcgaggccgugcugcggggccaggcccuccuggugaacuccagccagcccugggagccccugcagcuccacgucgacaaggccguguccggccugcgcagccugaccacccuccugcgggcgcugggggcccagaaggaggccaucucccccccggacgccgccagcgcggccccgcuccgcacgaucaccgccgacaccuuccggaagcuguuccgcguguacuccaacuuccugcggggcaagcucaagcuguacaccggggaggccugccgcacgggcgaccggugaggacuaguaauaaggaaacuguaugaaugucugugggcaggaagugaagagauccuucuguaaagguuuuuggaauuaugucugcugaauaauaaacuuuuuugaaauaauaaaucugguagaaaaaugagaucuaaaaaaaaaaaaaaaaaaaaaaaaaaaaaaaaaaaaaaaaaaaaaaaaaaaaaaaaaaaaaaaaugcaucccccccccccccccccccccccccccccccaaaggcucuuuucagagccaccagaauu

SEQ ID NO: 113 - RNA, 876 nt, Artificial Sequence
  mRNA product ATP5A1_HsEPO(GC)_CASP1_A64
gggagagcggcucggccauuuugucccagucaguccggaggcugcggcugcagaaguaccgccugcggaguaacugcaaagaagcuuaccaugggcgugcacgagugccccgccuggcuguggcuccugcugagccuccugucccugccgcucgggcugcccguccugggcgcccccccgcggcucaucugcgacagccgcgugcuggagcgguaccugcucgaggcgaaggaggccgagaacaucaccaccgggugcgccgagcacugcucccugaacgagaacaucacggugccggacaccaaggucaacuucuacgccuggaagcgcauggaggugggccagcaggccguggaggucuggcaggggcuggcgcuccugagcgaggccgugcugcggggccaggcccuccuggugaacuccagccagcccugggagccccugcagcuccacgucgacaaggccguguccggccugcgcagccugaccacccuccugcgggcgcugggggcccagaaggaggccaucucccccccggacgccgccagcgcggccccgcuccgcacgaucaccgccgacaccuuccggaagcuguuccgcguguacuccaacuuccugcggggcaagcucaagcuguacaccggggaggccugccgcacgggcgaccggugaggacuaguaauaaggaaacuguaugaaugucugugggcaggaagugaagagauccuucuguaaagguuuuuggaauuaugucugcugaauaauaaacuuuuuugaaauaauaaaucugguagaaaaaugagaucuaaaaaaaaaaaaaaaaaaaaaaaaaaaaaaaaaaaaaaaaaaaaaaaaaaaaaaaaaaaaaaaagaauu

SEQ ID NO: 114 - RNA, 2006 nt, Artificial Sequence
  mRNA product ATP5A1_PpLuc(GC)_CASP1_A64-C30-histoneSL
gggagagcggcucggccauuuugucccagucaguccggaggcugcggcugcagaaguaccgccugcggaguaacugcaaagaagcuuaccauggaggacgccaagaacaucaagaagggcccggcgcccuucuacccgcuggaggacgggaccgccggcgagcagcuccacaaggccaugaagcgguacgcccuggugccgggcacgaucgccuucaccgacgcccacaucgaggucgacaucaccuacgcggaguacuucgagaugagcgugcgccuggccgaggccaugaagcgguacggccugaacaccaaccaccggaucguggugugcucggagaacagccugcaguucuucaugccggugcugggcgcccucuucaucggcguggccgucgccccggcgaacgacaucuacaacgagcgggagcugcugaacagcauggggaucagccagccgaccgugguguucgugagcaagaagggccugcagaagauccugaacgugcagaagaagcugcccaucauccagaagaucaucaucauggacagcaagaccgacuaccagggcuuccagucgauguacacguucgugaccagccaccucccgccgggcuucaacgaguacgacuucgucccggagagcuucgaccgggacaagaccaucgcccugaucaugaacagcagcggcagcaccggccugccgaaggggguggcccugccgcaccggaccgccugcgugcgcuucucgcacgcccgggaccccaucuucggcaaccagaucaucccggacaccgccauccugagcguggugccguuccaccacggcuucggcauguucacgacccugggcuaccucaucugcggcuuccgggugguccugauguaccgguucgaggaggagcuguuccugcggagccugcaggacuacaagauccagagcgcgcugcucgugccgacccuguucagcuucuucgccaagagcacccugaucgacaaguacgaccugucgaaccugcacgagaucgccagcgggggcgccccgcugagcaaggaggugggcgaggccguggccaagcgguuccaccucccgggcauccgccagggcuacggccugaccgagaccacgagcgcgauccugaucacccccgagggggacgacaagccgggcgccgugggcaagguggucccguucuucgaggccaaggugguggaccuggacaccggcaagacccugggcgugaaccagcggggcgagcugugcgugcgggggccgaugaucaugagcggcuacgugaacaacccggaggccaccaacgcccucaucgacaaggacggcuggcugcacagcggcgacaucgccuacugggacgaggacgagcacuucuucaucgucgaccggcugaagucgcugaucaaguacaagggcuaccagguggcgccggccgagcuggagagcauccugcuccagcaccccaacaucuucgacgccggcguggccgggcugccggacgacgacgccggcgagcugccggccgcggugguggugcuggagcacggcaagaccaugacggagaaggagaucgucgacuacguggccagccaggugaccaccgccaagaagcugcggggcggcgugguguucguggacgaggucccgaagggccugaccgggaagcucgacgcccggaagauccgcgagauccugaucaaggccaagaagggcggcaagaucgccgugugaggacuaguaauaaggaaacuguaugaaugucugugggcaggaagugaagagauccuucuguaaagguuuuuggaauuaugucugcugaauaauaaacuuuuuugaaauaauaaaucugguagaaaaaugagaucuaaaaaaaaaaaaaaaaaaaaaaaaaaaaaaaaaaaaaaaaaaaaaaaaaaaaaaaaaaaaaaaaugcaucccccccccccccccccccccccccccccccaaaggcucuuuucagagccaccagaauu

SEQ ID NO: 115 - RNA, 1947 nt, Artificial Sequence
  mRNA product ATP5A1_PpLuc(GC)_CASP1_A64
gggagagcggcucggccauuuugucccagucaguccggaggcugcggcugcagaaguaccgccugcggaguaacugcaaagaagcuuaccauggaggacgccaagaacaucaagaagggcccggcgcccuucuacccgcuggaggacgggaccgccggcgagcagcuccacaaggccaugaagcgguacgcccuggugccgggcacgaucgccuucaccgacgcccacaucgaggucgacaucaccuacgcggaguacuucgagaugagcgugcgccuggccgaggccaugaagcgguacggccugaacaccaaccaccggaucguggugugcucggagaacagccugcaguucuucaugccggugcugggcgcccucuucaucggcguggccgucgccccggcgaacgacaucuacaacgagcgggagcugcugaacagcauggggaucagccagccgaccgugguguucgugagcaagaagggccugcagaagauccugaacgugcagaagaagcugcccaucauccagaagaucaucaucauggacagcaagaccgacuaccagggcuuccagucgauguacacguucgugaccagccaccucccgccgggcuucaacgaguacgacuucgucccggagagcuucgaccgggacaagaccaucgcccugaucaugaacagcagcggcagcaccggccugccgaaggggguggcccugccgcaccggaccgccugcgugcgcuucucgcacgcccgggaccccaucuucggcaaccagaucaucccggacaccgccauccugagcguggugccguuccaccacggcuucggcauguucacgacccugggcuaccucaucugcggcuuccgggugguccugauguaccgguucgaggaggagcuguuccugcggagccugcaggacuacaagauccagagcgcgcugcucgugccgacccuguucagcuucuucgccaagagcacccugaucgacaaguacgaccugucgaaccugcacgagaucgccagcgggggcgccccgcugagcaaggaggugggcgaggccguggccaagcgguuccaccucccgggcauccgccagggcuacggccugaccgagaccacgagcgcgauccugaucacccccgagggggacgacaagccgggcgccgugggcaagguggucccguucuucgaggccaaggugguggaccuggacaccggcaagacccugggcgugaaccagcggggcgagcugugcgugcgggggccgaugaucaugagcggcuacgugaacaacccggaggccaccaacgcccucaucgacaaggacggcuggcugcacagcggcgacaucgccuacugggacgaggacgagcacuucuucaucgucgaccggcugaagucgcugaucaaguacaagggcuaccagguggcgccggccgagcuggagagcauccugcuccagcaccccaacaucuucgacgccggcguggccgggcugccggacgacgacgccggcgagcugccggccgcggugguggugcuggagcacggcaagaccaugacggagaaggagaucgucgacuacguggccagccaggugaccaccgccaagaagcugcggggcggcgugguguucguggacgaggucccgaagggccugaccgggaagcucgacgcccggaagauccgcgagauccugaucaaggccaagaagggcggcaagaucgccgugugaggacuaguaauaaggaaacuguaugaaugucugugggcaggaagugaagagauccuucuguaaagguuuuuggaauuaugucugcugaauaauaaacuuuuuugaaauaauaaaucugguagaaaaaugagaucuaaaaaaaaaaaaaaaaaaaaaaaaaaaaaaaaaaaaaaaaaaaaaaaaaaaaaaaaaaaaaaaagaauu

SEQ ID NO: 116 - RNA, 2015 nt, Artificial Sequence
  mRNA product ATP5A1_protein of interest example 5_CASP1_A64-C30-histoneSL
  misc_feature (91)..(1752): n is a, c, g, or u
gggagagcggcucggccauuuugucccagucaguccggaggcugcggcugcagaaguaccgccugcggaguaacugcaaagaagcuuaccnnnnnnnnnnnnnnnnnnnnnnnnnnnnnnnnnnnnnnnnnnnnnnnnnnnnnnnnnnnnnnnnnnnnnnnnnnnnnnnnnnnnnnnnnnnnnnnnnnnnnnnnnnnnnnnnnnnnnnnnnnnnnnnnnnnnnnnnnnnnnnnnnnnnnnnnnnnnnnnnnnnnnnnnnnnnnnnnnnnnnnnnnnnnnnnnnnnnnnnnnnnnnnnnnnnnnnnnnnnnnnnnnnnnnnnnnnnnnnnnnnnnnnnnnnnnnnnnnnnnnnnnnnnnnnnnnnnnnnnnnnnnnnnnnnnnnnnnnnnnnnnnnnnnnnnnnnnnnnnnnnnnnnnnnnnnnnnnnnnnnnnnnnnnnnnnnnnnnnnnnnnnnnnnnnnnnnnnnnnnnnnnnnnnnnnnnnnnnnnnnnnnnnnnnnnnnnnnnnnnnnnnnnnnnnnnnnnnnnnnnnnnnnnnnnnnnnnnnnnnnnnnnnnnnnnnnnnnnnnnnnnnnnnnnnnnnnnnnnnnnnnnnnnnnnnnnnnnnnnnnnnnnnnnnnnnnnnnnnnnnnnnnnnnnnnnnnnnnnnnnnnnnnnnnnnnnnnnnnnnnnnnnnnnnnnnnnnnnnnnnnnnnnnnnnnnnnnnnnnnnnnnnnnnnnnnnnnnnnnnnnnnnnnnnnnnnnnnnnnnnnnnnnnnnnnnnnnnnnnnnnnnnnnnnnnnnnnnnnnnnnnnnnnnnnnnnnnnnnnnnnnnnnnnnnnnnnnnnnnnnnnnnnnnnnnnnnnnnnnnnnnnnnnnnnnnnnnnnnnnnnnnnnnnnnnnnnnnnnnnnnnnnnnnnnnnnnnnnnnnnnnnnnnnnnnnnnnnnnnnnnnnnnnnnnnnnnnnnnnnnnnnnnnnnnnnnnnnnnnnnnnnnnnnnnnnnnnnnnnnnnnnnnnnnnnnnnnnnnnnnnnnnnnnnnnnnnnnnnnnnnnnnnnnnnnnnnnnnnnnnnnnnnnnnnnnnnnnnnnnnnnnnnnnnnnnnnnnnnnnnnnnnnnnnnnnnnnnnnnnnnnnnnnnnnnnnnnnnnnnnnnnnnnnnnnnnnnnnnnnnnnnnnnnnnnnnnnnnnnnnnnnnnnnnnnnnnnnnnnnnnnnnnnnnnnnnnnnnnnnnnnnnnnnnnnnnnnnnnnnnnnnnnnnnnnnnnnnnnnnnnnnnnnnnnnnnnnnnnnnnnnnnnnnnnnnnnnnnnnnnnnnnnnnnnnnnnnnnnnnnnnnnnnnnnnnnnnnnnnnnnnnnnnnnnnnnnnnnnnnnnnnnnnnnnnnnnnnnnnnnnnnnnnnnnnnnnnnnnnnnnnnnnnnnnnnnnnnnnnnnnnnnnnnnnnnnnnnnnnnnnnnnnnnnnnnnnnnnnnnnnnnnnnnnnnnnnnnnnnnnnnnnnnnnnnnnnnnnnnnnnnnnnnnnnnnnnnnnnnnnnnnnnnnnnnnnnnnnnnnnnnnnnnnnnnnnnnnnnnnnnnnnnnnnnnnnnnnnnnnnnnnnnnnnnnnnnnnnnnnnnnnnnnnnnnnnnnnnnnnnnnnnnnnnnnnnnnnnnnnnnnnnnnnnnnnnnnnnnnnnnnnnnnnnnnnnnnnnnnnnnnnnnnnnnnnnnnnnnnnnnnnnnnnnnnnnnnnnnnnnnnnnnnnnnnnnnnnnnnnnnnnnnnnnnnnnnnnnnnnnnggacuaguaauaaggaaacuguaugaaugucugugggcaggaagugaagagauccuucuguaaagguuuuuggaauuaugucugcugaauaauaaacuuuuuugaaauaauaaaucugguagaaaaaugagaucuaaaaaaaaaaaaaaaaaaaaaaaaaaaaaaaaaaaaaaaaaaaaaaaaaaaaaaaaaaaaaaaaugcaucccccccccccccccccccccccccccccccaaaggcucuuuucagagccaccagaauu

SEQ ID NO: 117 - RNA, 1944 nt, Artificial Sequence
  mRNA product ATP5A1_RAV-G(GC)_COX6B1_A64-C30-histoneSL
gggagagcggcucggccauuuugucccagucaguccggaggcugcggcugcagaaguaccgccugcggaguaacugcaaagaagcuuaccauggugccccaggcccuccuguucgucccgcugcugguguucccccucugcuucggcaaguuccccaucuacaccauccccgacaagcuggggccguggagccccaucgacauccaccaccuguccugccccaacaaccucguggucgaggacgagggcugcaccaaccugagcggguucuccuacauggagcugaaggugggcuacaucagcgccaucaagaugaacggguucacgugcaccggcguggucaccgaggcggagaccuacacgaacuucgugggcuacgugaccaccaccuucaagcggaagcacuuccgccccacgccggacgccugccgggccgccuacaacuggaagauggccggggacccccgcuacgaggagucccuccacaaccccuaccccgacuaccacuggcugcggaccgucaagaccaccaaggagagccuggugaucaucuccccgagcguggcggaccucgaccccuacgaccgcucccugcacagccgggucuuccccggcgggaacugcuccggcguggccgugagcuccacguacugcagcaccaaccacgacuacaccaucuggaugcccgagaacccgcgccuggggauguccugcgacaucuucaccaacagccggggcaagcgcgccuccaagggcagcgagacgugcggguucgucgacgagcggggccucuacaagucccugaagggggccugcaagcugaagcucugcggcgugcugggccugcgccucauggacgggaccuggguggcgaugcagaccagcaacgagaccaaguggugcccccccggccagcuggucaaccugcacgacuuccggagcgacgagaucgagcaccucgugguggaggagcuggucaagaagcgcgaggagugccuggacgcccucgaguccaucaugacgaccaagagcguguccuuccggcgccugagccaccuccggaagcuggugcccggguucggcaaggccuacaccaucuucaacaagacccugauggaggccgacgcccacuacaaguccguccgcacguggaacgagaucaucccgagcaaggggugccugcgggugggcggccgcugccacccccacgucaacgggguguucuucaacggcaucauccucgggcccgacggcaacgugcugauccccgagaugcaguccagccugcuccagcagcacauggagcugcuggucuccagcgugaucccgcucaugcacccccuggcggaccccuccaccguguucaagaacggggacgaggccgaggacuucgucgaggugcaccuccccgacgugcacgagcggaucagcggcgucgaccugggccugccgaacugggggaaguacgugcugcucuccgccggcgcccugaccgcccugaugcugaucaucuuccucaugaccugcuggcgccgggugaaccggagcgagcccacgcagcacaaccugcgcgggaccggccgggaggucuccgugaccccgcagagcgggaagaucaucuccagcugggaguccuacaagagcggcggcgagaccgggcugugaggacuaguacuggcugcaucucccuuuccucuguccuccauccuucucccaggauggugaagggggaccugguacccagugauccccaccccaggauccuaaaucaugacuuaccugcuaauaaaaacucauuggaaaagugagaagaucuaaaaaaaaaaaaaaaaaaaaaaaaaaaaaaaaaaaaaaaaaaaaaaaaaaaaaaaaaaaaaaaaugcaucccccccccccccccccccccccccccccccaaaggcucuuuucagagccaccagaauu

SEQ ID NO: 118 - RNA, 1885 nt, Artificial Sequence
  mRNA product ATP5A1_RAV-G(GC)_COX6B1_A64
gggagagcggcucggccauuuugucccagucaguccggaggcugcggcugcagaaguaccgccugcggaguaacugcaaagaagcuuaccauggugccccaggcccuccuguucgucccgcugcugguguucccccucugcuucggcaaguuccccaucuacaccauccccgacaagcuggggccguggagccccaucgacauccaccaccuguccugccccaacaaccucguggucgaggacgagggcugcaccaaccugagcggguucuccuacauggagcugaaggugggcuacaucagcgccaucaagaugaacggguucacgugcaccggcguggucaccgaggcggagaccuacacgaacuucgugggcuacgugaccaccaccuucaagcggaagcacuuccgccccacgccggacgccugccgggccgccuacaacuggaagauggccggggacccccgcuacgaggagucccuccacaaccccuaccccgacuaccacuggcugcggaccgucaagaccaccaaggagagccuggugaucaucuccccgagcguggcggaccucgaccccuacgaccgcucccugcacagccgggucuuccccggcgggaacugcuccggcguggccgugagcuccacguacugcagcaccaaccacgacuacaccaucuggaugcccgagaacccgcgccuggggauguccugcgacaucuucaccaacagccggggcaagcgcgccuccaagggcagcgagacgugcggguucgucgacgagcggggccucuacaagucccugaagggggccugcaagcugaagcucugcggcgugcugggccugcgccucauggacgggaccuggguggcgaugcagaccagcaacgagaccaaguggugcccccccggccagcuggucaaccugcacgacuuccggagcgacgagaucgagcaccucgugguggaggagcuggucaagaagcgcgaggagugccuggacgcccucgaguccaucaugacgaccaagagcguguccuuccggcgccugagccaccuccggaagcuggugcccggguucggcaaggccuacaccaucuucaacaagacccugauggaggccgacgcccacuacaaguccguccgcacguggaacgagaucaucccgagcaaggggugccugcgggugggcggccgcugccacccccacgucaacgggguguucuucaacggcaucauccucgggcccgacggcaacgugcugauccccgagaugcaguccagccugcuccagcagcacauggagcugcuggucuccagcgugaucccgcucaugcacccccuggcggaccccuccaccguguucaagaacggggacgaggccgaggacuucgucgaggugcaccuccccgacgugcacgagcggaucagcggcgucgaccugggccugccgaacugggggaaguacgugcugcucuccgccggcgcccugaccgcccugaugcugaucaucuuccucaugaccugcuggcgccgggugaaccggagcgagcccacgcagcacaaccugcgcgggaccggccgggaggucuccgugaccccgcagagcgggaagaucaucuccagcugggaguccuacaagagcggcggcgagaccgggcugugaggacuaguacuggcugcaucucccuuuccucuguccuccauccuucucccaggauggugaagggggaccugguacccagugauccccaccccaggauccuaaaucaugacuuaccugcuaauaaaaacucauuggaaaagugagaagaucuaaaaaaaaaaaaaaaaaaaaaaaaaaaaaaaaaaaaaaaaaaaaaaaaaaaaaaaaaaaaaaaagaauu

SEQ ID NO: 119 - RNA, 951 nt, Artificial Sequence
  mRNA product ATP5A1_HsEPO(GC)_COX6B1_A64-C30-histoneSL
gggagagcggcucggccauuuugucccagucaguccggaggcugcggcugcagaaguaccgccugcggaguaacugcaaagaagcuuaccaugggcgugcacgagugccccgccuggcuguggcuccugcugagccuccugucccugccgcucgggcugcccguccugggcgcccccccgcggcucaucugcgacagccgcgugcuggagcgguaccugcucgaggcgaaggaggccgagaacaucaccaccgggugcgccgagcacugcucccugaacgagaacaucacggugccggacaccaaggucaacuucuacgccuggaagcgcauggaggugggccagcaggccguggaggucuggcaggggcuggcgcuccugagcgaggccgugcugcggggccaggcccuccuggugaacuccagccagcccugggagccccugcagcuccacgucgacaaggccguguccggccugcgcagccugaccacccuccugcgggcgcugggggcccagaaggaggccaucucccccccggacgccgccagcgcggccccgcuccgcacgaucaccgccgacaccuuccggaagcuguuccgcguguacuccaacuuccugcggggcaagcucaagcuguacaccggggaggccugccgcacgggcgaccggugaggacuaguacuggcugcaucucccuuuccucuguccuccauccuucucccaggauggugaagggggaccugguacccagugauccccaccccaggauccuaaaucaugacuuaccugcuaauaaaaacucauuggaaaagugagaagaucuaaaaaaaaaaaaaaaaaaaaaaaaaaaaaaaaaaaaaaaaaaaaaaaaaaaaaaaaaaaaaaaaugcaucccccccccccccccccccccccccccccccaaaggcucuuuucagagccaccagaauu

SEQ ID NO: 120 - RNA, 892 nt, Artificial Sequence
  mRNA product ATP5A1_HsEPO(GC)_COX6B1_A64
gggagagcggcucggccauuuugucccagucaguccggaggcugcggcugcagaaguaccgccugcggaguaacugcaaagaagcuuaccaugggcgugcacgagugccccgccuggcuguggcuccugcugagccuccugucccugccgcucgggcugcccguccugggcgcccccccgcggcucaucugcgacagccgcgugcuggagcgguaccugcucgaggcgaaggaggccgagaacaucaccaccgggugcgccgagcacugcucccugaacgagaacaucacggugccggacaccaaggucaacuucuacgccuggaagcgcauggaggugggccagcaggccguggaggucuggcaggggcuggcgcuccugagcgaggccgugcugcggggccaggcccuccuggugaacuccagccagcccugggagccccugcagcuccacgucgacaaggccguguccggccugcgcagccugaccacccuccugcgggcgcugggggcccagaaggaggccaucucccccccggacgccgccagcgcggccccgcuccgcacgaucaccgccgacaccuuccggaagcuguuccgcguguacuccaacuuccugcggggcaagcucaagcuguacaccggggaggccugccgcacgggcgaccggugaggacuaguacuggcugcaucucccuuuccucuguccuccauccuucucccaggauggugaagggggaccugguacccagugauccccaccccaggauccuaaaucaugacuuaccugcuaauaaaaacucauuggaaaagugagaagaucuaaaaaaaaaaaaaaaaaaaaaaaaaaaaaaaaaaaaaaaaaaaaaaaaaaaaaaaaaaaaaaaagaauu

SEQ ID NO: 121 - RNA, 2022 nt, Artificial Sequence
  mRNA product ATP5A1_PpLuc(GC)_COX6B1_A64-C30-histoneSL
gggagagcggcucggccauuuugucccagucaguccggaggcugcggcugcagaaguaccgccugcggaguaacugcaaagaagcuuaccauggaggacgccaagaacaucaagaagggcccggcgcccuucuacccgcuggaggacgggaccgccggcgagcagcuccacaaggccaugaagcgguacgcccuggugccgggcacgaucgccuucaccgacgcccacaucgaggucgacaucaccuacgcggaguacuucgagaugagcgugcgccuggccgaggccaugaagcgguacggccugaacaccaaccaccggaucguggugugcucggagaacagccugcaguucuucaugccggugcugggcgcccucuucaucggcguggccgucgccccggcgaacgacaucuacaacgagcgggagcugcugaacagcauggggaucagccagccgaccgugguguucgugagcaagaagggccugcagaagauccugaacgugcagaagaagcugcccaucauccagaagaucaucaucauggacagcaagaccgacuaccagggcuuccagucgauguacacguucgugaccagccaccucccgccgggcuucaacgaguacgacuucgucccggagagcuucgaccgggacaagaccaucgcccugaucaugaacagcagcggcagcaccggccugccgaaggggguggcccugccgcaccggaccgccugcgugcgcuucucgcacgcccgggaccccaucuucggcaaccagaucaucccggacaccgccauccugagcguggugccguuccaccacggcuucggcauguucacgacccugggcuaccucaucugcggcuuccgggugguccugauguaccgguucgaggaggagcuguuccugcggagccugcaggacuacaagauccagagcgcgcugcucgugccgacccuguucagcuucuucgccaagagcacccugaucgacaaguacgaccugucgaaccugcacgagaucgccagcgggggcgccccgcugagcaaggaggugggcgaggccguggccaagcgguuccaccucccgggcauccgccagggcuacggccugaccgagaccacgagcgcgauccugaucacccccgagggggacgacaagccgggcgccgugggcaagguggucccguucuucgaggccaaggugguggaccuggacaccggcaagacccugggcgugaaccagcggggcgagcugugcgugcgggggccgaugaucaugagcggcuacgugaacaacccggaggccaccaacgcccucaucgacaaggacggcuggcugcacagcggcgacaucgccuacugggacgaggacgagcacuucuucaucgucgaccggcugaagucgcugaucaaguacaagggcuaccagguggcgccggccgagcuggagagcauccugcuccagcaccccaacaucuucgacgccggcguggccgggcugccggacgacgacgccggcgagcugccggccgcggugguggugcuggagcacggcaagaccaugacggagaaggagaucgucgacuacguggccagccaggugaccaccgccaagaagcugcggggcggcgugguguucguggacgaggucccgaagggccugaccgggaagcucgacgcccggaagauccgcgagauccugaucaaggccaagaagggcggcaagaucgccgugugaggacuaguacuggcugcaucucccuuuccucuguccuccauccuucucccaggauggugaagggggaccugguacccagugauccccaccccaggauccuaaaucaugacuuaccugcuaauaaaaacucauuggaaaagugagaagaucuaaaaaaaaaaaaaaaaaaaaaaaaaaaaaaaaaaaaaaaaaaaaaaaaaaaaaaaaaaaaaaaaugcaucccccccccccccccccccccccccccccccaaaggcucuuuucagagccaccagaauu

SEQ ID NO: 122 - RNA, 1963 nt, Artificial Sequence
  mRNA product ATP5A1_PpLuc(GC)_COX6B1_A64
gggagagcggcucggccauuuugucccagucaguccggaggcugcggcugcagaaguaccgccugcggaguaacugcaaagaagcuuaccauggaggacgccaagaacaucaagaagggcccggcgcccuucuacccgcuggaggacgggaccgccggcgagcagcuccacaaggccaugaagcgguacgcccuggugccgggcacgaucgccuucaccgacgcccacaucgaggucgacaucaccuacgcggaguacuucgagaugagcgugcgccuggccgaggccaugaagcgguacggccugaacaccaaccaccggaucguggugugcucggagaacagccugcaguucuucaugccggugcugggcgcccucuucaucggcguggccgucgccccggcgaacgacaucuacaacgagcgggagcugcugaacagcauggggaucagccagccgaccgugguguucgugagcaagaagggccugcagaagauccugaacgugcagaagaagcugcccaucauccagaagaucaucaucauggacagcaagaccgacuaccagggcuuccagucgauguacacguucgugaccagccaccucccgccgggcuucaacgaguacgacuucgucccggagagcuucgaccgggacaagaccaucgcccugaucaugaacagcagcggcagcaccggccugccgaaggggguggcccugccgcaccggaccgccugcgugcgcuucucgcacgcccgggaccccaucuucggcaaccagaucaucccggacaccgccauccugagcguggugccguuccaccacggcuucggcauguucacgacccugggcuaccucaucugcggcuuccgggugguccugauguaccgguucgaggaggagcuguuccugcggagccugcaggacuacaagauccagagcgcgcugcucgugccgacccuguucagcuucuucgccaagagcacccugaucgacaaguacgaccugucgaaccugcacgagaucgccagcgggggcgccccgcugagcaaggaggugggcgaggccguggccaagcgguuccaccucccgggcauccgccagggcuacggccugaccgagaccacgagcgcgauccugaucacccccgagggggacgacaagccgggcgccgugggcaagguggucccguucuucgaggccaaggugguggaccuggacaccggcaagacccugggcgugaaccagcggggcgagcugugcgugcgggggccgaugaucaugagcggcuacgugaacaacccggaggccaccaacgcccucaucgacaaggacggcuggcugcacagcggcgacaucgccuacugggacgaggacgagcacuucuucaucgucgaccggcugaagucgcugaucaaguacaagggcuaccagguggcgccggccgagcuggagagcauccugcuccagcaccccaacaucuucgacgccggcguggccgggcugccggacgacgacgccggcgagcugccggccgcggugguggugcuggagcacggcaagaccaugacggagaaggagaucgucgacuacguggccagccaggugaccaccgccaagaagcugcggggcggcgugguguucguggacgaggucccgaagggccugaccgggaagcucgacgcccggaagauccgcgagauccugaucaaggccaagaagggcggcaagaucgccgugugaggacuaguacuggcugcaucucccuuuccucuguccuccauccuucucccaggauggugaagggggaccugguacccagugauccccaccccaggauccuaaaucaugacuuaccugcuaauaaaaacucauuggaaaagugagaagaucuaaaaaaaaaaaaaaaaaaaaaaaaaaaaaaaaaaaaaaaaaaaaaaaaaaaaaaaaaaaaaaaagaauu

SEQ ID NO: 123 - RNA, 2031 nt, Artificial Sequence
  mRNA product ATP5A1_protein of interest example 5_COX6B1_A64-C30-histoneSL
  misc_feature (91)..(1752): n is a, c, g, or u
gggagagcggcucggccauuuugucccagucaguccggaggcugcggcugcagaaguaccgccugcggaguaacugcaaagaagcuuaccnnnnnnnnnnnnnnnnnnnnnnnnnnnnnnnnnnnnnnnnnnnnnnnnnnnnnnnnnnnnnnnnnnnnnnnnnnnnnnnnnnnnnnnnnnnnnnnnnnnnnnnnnnnnnnnnnnnnnnnnnnnnnnnnnnnnnnnnnnnnnnnnnnnnnnnnnnnnnnnnnnnnnnnnnnnnnnnnnnnnnnnnnnnnnnnnnnnnnnnnnnnnnnnnnnnnnnnnnnnnnnnnnnnnnnnnnnnnnnnnnnnnnnnnnnnnnnnnnnnnnnnnnnnnnnnnnnnnnnnnnnnnnnnnnnnnnnnnnnnnnnnnnnnnnnnnnnnnnnnnnnnnnnnnnnnnnnnnnnnnnnnnnnnnnnnnnnnnnnnnnnnnnnnnnnnnnnnnnnnnnnnnnnnnnnnnnnnnnnnnnnnnnnnnnnnnnnnnnnnnnnnnnnnnnnnnnnnnnnnnnnnnnnnnnnnnnnnnnnnnnnnnnnnnnnnnnnnnnnnnnnnnnnnnnnnnnnnnnnnnnnnnnnnnnnnnnnnnnnnnnnnnnnnnnnnnnnnnnnnnnnnnnnnnnnnnnnnnnnnnnnnnnnnnnnnnnnnnnnnnnnnnnnnnnnnnnnnnnnnnnnnnnnnnnnnnnnnnnnnnnnnnnnnnnnnnnnnnnnnnnnnnnnnnnnnnnnnnnnnnnnnnnnnnnnnnnnnnnnnnnnnnnnnnnnnnnnnnnnnnnnnnnnnnnnnnnnnnnnnnnnnnnnnnnnnnnnnnnnnnnnnnnnnnnnnnnnnnnnnnnnnnnnnnnnnnnnnnnnnnnnnnnnnnnnnnnnnnnnnnnnnnnnnnnnnnnnnnnnnnnnnnnnnnnnnnnnnnnnnnnnnnnnnnnnnnnnnnnnnnnnnnnnnnnnnnnnnnnnnnnnnnnnnnnnnnnnnnnnnnnnnnnnnnnnnnnnnnnnnnnnnnnnnnnnnnnnnnnnnnnnnnnnnnnnnnnnnnnnnnnnnnnnnnnnnnnnnnnnnnnnnnnnnnnnnnnnnnnnnnnnnnnnnnnnnnnnnnnnnnnnnnnnnnnnnnnnnnnnnnnnnnnnnnnnnnnnnnnnnnnnnnnnnnnnnnnnnnnnnnnnnnnnnnnnnnnnnnnnnnnnnnnnnnnnnnnnnnnnnnnnnnnnnnnnnnnnnnnnnnnnnnnnnnnnnnnnnnnnnnnnnnnnnnnnnnnnnnnnnnnnnnnnnnnnnnnnnnnnnnnnnnnnnnnnnnnnnnnnnnnnnnnnnnnnnnnnnnnnnnnnnnnnnnnnnnnnnnnnnnnnnnnnnnnnnnnnnnnnnnnnnnnnnnnnnnnnnnnnnnnnnnnnnnnnnnnnnnnnnnnnnnnnnnnnnnnnnnnnnnnnnnnnnnnnnnnnnnnnnnnnnnnnnnnnnnnnnnnnnnnnnnnnnnnnnnnnnnnnnnnnnnnnnnnnnnnnnnnnnnnnnnnnnnnnnnnnnnnnnnnnnnnnnnnnnnnnnnnnnnnnnnnnnnnnnnnnnnnnnnnnnnnnnnnnnnnnnnnnnnnnnnnnnnnnnnnnnnnnnnnnnnnnnnnnnnnnnnnnnnnnnnnnnnnnnnnnnnnnnnnnnnnnnnnnnnnnnnnnnnnnnnnnnnnnnnnnnnnnnnnnnnnnnnnnnnnnnnnnnnnnnnnnnnnnnnnnnnnnnnnnnnnnnnnnnnnnnnnnnnnnggacuaguacuggcugcaucucccuuuccucuguccuccauccuucucccaggauggugaagggggaccugguacccagugauccccaccccaggauccuaaaucaugacuuaccugcuaauaaaaacucauuggaaaagugagaagaucuaaaaaaaaaaaaaaaaaaaaaaaaaaaaaaaaaaaaaaaaaaaaaaaaaaaaaaaaaaaaaaaaugcaucccccccccccccccccccccccccccccccaaaggcucuuuucagagccaccagaauu

SEQ ID NO: 124 - RNA, 2160 nt, Artificial Sequence
  mRNA product ATP5A1_RAV-G(GC)_Gnas_A64-C30-histoneSL
gggagagcggcucggccauuuugucccagucaguccggaggcugcggcugcagaaguaccgccugcggaguaacugcaaagaagcuuaccauggugccccaggcccuccuguucgucccgcugcugguguucccccucugcuucggcaaguuccccaucuacaccauccccgacaagcuggggccguggagccccaucgacauccaccaccuguccugccccaacaaccucguggucgaggacgagggcugcaccaaccugagcggguucuccuacauggagcugaaggugggcuacaucagcgccaucaagaugaacggguucacgugcaccggcguggucaccgaggcggagaccuacacgaacuucgugggcuacgugaccaccaccuucaagcggaagcacuuccgccccacgccggacgccugccgggccgccuacaacuggaagauggccggggacccccgcuacgaggagucccuccacaaccccuaccccgacuaccacuggcugcggaccgucaagaccaccaaggagagccuggugaucaucuccccgagcguggcggaccucgaccccuacgaccgcucccugcacagccgggucuuccccggcgggaacugcuccggcguggccgugagcuccacguacugcagcaccaaccacgacuacaccaucuggaugcccgagaacccgcgccuggggauguccugcgacaucuucaccaacagccggggcaagcgcgccuccaagggcagcgagacgugcggguucgucgacgagcggggccucuacaagucccugaagggggccugcaagcugaagcucugcggcgugcugggccugcgccucauggacgggaccuggguggcgaugcagaccagcaacgagaccaaguggugcccccccggccagcuggucaaccugcacgacuuccggagcgacgagaucgagcaccucgugguggaggagcuggucaagaagcgcgaggagugccuggacgcccucgaguccaucaugacgaccaagagcguguccuuccggcgccugagccaccuccggaagcuggugcccggguucggcaaggccuacaccaucuucaacaagacccugauggaggccgacgcccacuacaaguccguccgcacguggaacgagaucaucccgagcaaggggugccugcgggugggcggccgcugccacccccacgucaacgggguguucuucaacggcaucauccucgggcccgacggcaacgugcugauccccgagaugcaguccagccugcuccagcagcacauggagcugcuggucuccagcgugaucccgcucaugcacccccuggcggaccccuccaccguguucaagaacggggacgaggccgaggacuucgucgaggugcaccuccccgacgugcacgagcggaucagcggcgucgaccugggccugccgaacugggggaaguacgugcugcucuccgccggcgcccugaccgcccugaugcugaucaucuuccucaugaccugcuggcgccgggugaaccggagcgagcccacgcagcacaaccugcgcgggaccggccgggaggucuccgugaccccgcagagcgggaagaucaucuccagcugggaguccuacaagagcggcggcgagaccgggcugugaggacuagugaagggaacacccaaauuuaauucagccuuaagcacaauuaauuaagagugaaacguaauuguacaagcaguuggucacccaccauagggcaugaucaacaccgcaaccuuuccuuuuucccccagugauucugaaaaaccccucuucccuucagcuugcuuagauguuccaaauuuaguaagcuuaaggcggccuacagaagaaaaagaaaaaaaaggccacaaaaguucccucucacuuucaguaaauaaaauaaaagcagcaacagaaauaaagaaauaaaugaaauucaaaaugaaauaaauauuguguugugcagcauuaaaaaaucaauaaaaauuaaaaaugagcaagaucuaaaaaaaaaaaaaaaaaaaaaaaaaaaaaaaaaaaaaaaaaaaaaaaaaaaaaaaaaaaaaaaaugcaucccccccccccccccccccccccccccccccaaaggcucuuuucagagccaccagaauu

SEQ ID NO: 125 - RNA, 2101 nt, Artificial Sequence
  mRNA product ATP5A1_RAV-G(GC)_Gnas_A64
gggagagcggcucggccauuuugucccagucaguccggaggcugcggcugcagaaguaccgccugcggaguaacugcaaagaagcuuaccauggugccccaggcccuccuguucgucccgcugcugguguucccccucugcuucggcaaguuccccaucuacaccauccccgacaagcuggggccguggagccccaucgacauccaccaccuguccugccccaacaaccucguggucgaggacgagggcugcaccaaccugagcggguucuccuacauggagcugaaggugggcuacaucagcgccaucaagaugaacggguucacgugcaccggcguggucaccgaggcggagaccuacacgaacuucgugggcuacgugaccaccaccuucaagcggaagcacuuccgccccacgccggacgccugccgggccgccuacaacuggaagauggccggggacccccgcuacgaggagucccuccacaaccccuaccccgacuaccacuggcugcggaccgucaagaccaccaaggagagccuggugaucaucuccccgagcguggcggaccucgaccccuacgaccgcucccugcacagccgggucuuccccggcgggaacugcuccggcguggccgugagcuccacguacugcagcaccaaccacgacuacaccaucuggaugcccgagaacccgcgccuggggauguccugcgacaucuucaccaacagccggggcaagcgcgccuccaagggcagcgagacgugcggguucgucgacgagcggggccucuacaagucccugaagggggccugcaagcugaagcucugcggcgugcugggccugcgccucauggacgggaccuggguggcgaugcagaccagcaacgagaccaaguggugcccccccggccagcuggucaaccugcacgacuuccggagcgacgagaucgagcaccucgugguggaggagcuggucaagaagcgcgaggagugccuggacgcccucgaguccaucaugacgaccaagagcguguccuuccggcgccugagccaccuccggaagcuggugcccggguucggcaaggccuacaccaucuucaacaagacccugauggaggccgacgcccacuacaaguccguccgcacguggaacgagaucaucccgagcaaggggugccugcgggugggcggccgcugccacccccacgucaacgggguguucuucaacggcaucauccucgggcccgacggcaacgugcugauccccgagaugcaguccagccugcuccagcagcacauggagcugcuggucuccagcgugaucccgcucaugcacccccuggcggaccccuccaccguguucaagaacggggacgaggccgaggacuucgucgaggugcaccuccccgacgugcacgagcggaucagcggcgucgaccugggccugccgaacugggggaaguacgugcugcucuccgccggcgcccugaccgcccugaugcugaucaucuuccucaugaccugcuggcgccgggugaaccggagcgagcccacgcagcacaaccugcgcgggaccggccgggaggucuccgugaccccgcagagcgggaagaucaucuccagcugggaguccuacaagagcggcggcgagaccgggcugugaggacuagugaagggaacacccaaauuuaauucagccuuaagcacaauuaauuaagagugaaacguaauuguacaagcaguuggucacccaccauagggcaugaucaacaccgcaaccuuuccuuuuucccccagugauucugaaaaaccccucuucccuucagcuugcuuagauguuccaaauuuaguaagcuuaaggcggccuacagaagaaaaagaaaaaaaaggccacaaaaguucccucucacuuucaguaaauaaaauaaaagcagcaacagaaauaaagaaauaaaugaaauucaaaaugaaauaaauauuguguugugcagcauuaaaaaaucaauaaaaauuaaaaaugagcaagaucuaaaaaaaaaaaaaaaaaaaaaaaaaaaaaaaaaaaaaaaaaaaaaaaaaaaaaaaaaaaaaaaagaauu

SEQ ID NO: 126 - RNA, 1167 nt, Artificial Sequence
  mRNA product ATP5A1_HsEPO(GC)_Gnas_A64-C30-histoneSL
gggagagcggcucggccauuuugucccagucaguccggaggcugcggcugcagaaguaccgccugcggaguaacugcaaagaagcuuaccaugggcgugcacgagugccccgccuggcuguggcuccugcugagccuccugucccugccgcucgggcugcccguccugggcgcccccccgcggcucaucugcgacagccgcgugcuggagcgguaccugcucgaggcgaaggaggccgagaacaucaccaccgggugcgccgagcacugcucccugaacgagaacaucacggugccggacaccaaggucaacuucuacgccuggaagcgcauggaggugggccagcaggccguggaggucuggcaggggcuggcgcuccugagcgaggccgugcugcggggccaggcccuccuggugaacuccagccagcccugggagccccugcagcuccacgucgacaaggccguguccggccugcgcagccugaccacccuccugcgggcgcugggggcccagaaggaggccaucucccccccggacgccgccagcgcggccccgcuccgcacgaucaccgccgacaccuuccggaagcuguuccgcguguacuccaacuuccugcggggcaagcucaagcuguacaccggggaggccugccgcacgggcgaccggugaggacuagugaagggaacacccaaauuuaauucagccuuaagcacaauuaauuaagagugaaacguaauuguacaagcaguuggucacccaccauagggcaugaucaacaccgcaaccuuuccuuuuucccccagugauucugaaaaaccccucuucccuucagcuugcuuagauguuccaaauuuaguaagcuuaaggcggccuacagaagaaaaagaaaaaaaaggccacaaaaguucccucucacuuucaguaaauaaaauaaaagcagcaacagaaauaaagaaauaaaugaaauucaaaaugaaauaaauauuguguugugcagcauuaaaaaaucaauaaaaauuaaaaaugagcaagaucuaaaaaaaaaaaaaaaaaaaaaaaaaaaaaaaaaaaaaaaaaaaaaaaaaaaaaaaaaaaaaaaaugcaucccccccccccccccccccccccccccccccaaaggcucuuuucagagccaccagaauu

SEQ ID NO: 127 - RNA, 1108 nt, Artificial Sequence
  mRNA product ATP5A1_HsEPO(GC)_Gnas_A64
gggagagcggcucggccauuuugucccagucaguccggaggcugcggcugcagaaguaccgccugcggaguaacugcaaagaagcuuaccaugggcgugcacgagugccccgccuggcuguggcuccugcugagccuccugucccugccgcucgggcugcccguccugggcgcccccccgcggcucaucugcgacagccgcgugcuggagcgguaccugcucgaggcgaaggaggccgagaacaucaccaccgggugcgccgagcacugcucccugaacgagaacaucacggugccggacaccaaggucaacuucuacgccuggaagcgcauggaggugggccagcaggccguggaggucuggcaggggcuggcgcuccugagcgaggccgugcugcggggccaggcccuccuggugaacuccagccagcccugggagccccugcagcuccacgucgacaaggccguguccggccugcgcagccugaccacccuccugcgggcgcugggggcccagaaggaggccaucucccccccggacgccgccagcgcggccccgcuccgcacgaucaccgccgacaccuuccggaagcuguuccgcguguacuccaacuuccugcggggcaagcucaagcuguacaccggggaggccugccgcacgggcgaccggugaggacuagugaagggaacacccaaauuuaauucagccuuaagcacaauuaauuaagagugaaacguaauuguacaagcaguuggucacccaccauagggcaugaucaacaccgcaaccuuuccuuuuucccccagugauucugaaaaaccccucuucccuucagcuugcuuagauguuccaaauuuaguaagcuuaaggcggccuacagaagaaaaagaaaaaaaaggccacaaaaguucccucucacuuucaguaaauaaaauaaaagcagcaacagaaauaaagaaauaaaugaaauucaaaaugaaauaaauauuguguugugcagcauuaaaaaaucaauaaaaauuaaaaaugagcaagaucuaaaaaaaaaaaaaaaaaaaaaaaaaaaaaaaaaaaaaaaaaaaaaaaaaaaaaaaaaaaaaaaagaauu

SEQ ID NO: 128 - RNA, 2238 nt, Artificial Sequence
  mRNA product ATP5A1_PpLuc(GC)_Gnas_A64-C30-histoneSL
gggagagcggcucggccauuuugucccagucaguccggaggcugcggcugcagaaguaccgccugcggaguaacugcaaagaagcuuaccauggaggacgccaagaacaucaagaagggcccggcgcccuucuacccgcuggaggacgggaccgccggcgagcagcuccacaaggccaugaagcgguacgcccuggugccgggcacgaucgccuucaccgacgcccacaucgaggucgacaucaccuacgcggaguacuucgagaugagcgugcgccuggccgaggccaugaagcgguacggccugaacaccaaccaccggaucguggugugcucggagaacagccugcaguucuucaugccggugcugggcgcccucuucaucggcguggccgucgccccggcgaacgacaucuacaacgagcgggagcugcugaacagcauggggaucagccagccgaccgugguguucgugagcaagaagggccugcagaagauccugaacgugcagaagaagcugcccaucauccagaagaucaucaucauggacagcaagaccgacuaccagggcuuccagucgauguacacguucgugaccagccaccucccgccgggcuucaacgaguacgacuucgucccggagagcuucgaccgggacaagaccaucgcccugaucaugaacagcagcggcagcaccggccugccgaaggggguggcccugccgcaccggaccgccugcgugcgcuucucgcacgcccgggaccccaucuucggcaaccagaucaucccggacaccgccauccugagcguggugccguuccaccacggcuucggcauguucacgacccugggcuaccucaucugcggcuuccgggugguccugauguaccgguucgaggaggagcuguuccugcggagccugcaggacuacaagauccagagcgcgcugcucgugccgacccuguucagcuucuucgccaagagcacccugaucgacaaguacgaccugucgaaccugcacgagaucgccagcgggggcgccccgcugagcaaggaggugggcgaggccguggccaagcgguuccaccucccgggcauccgccagggcuacggccugaccgagaccacgagcgcgauccugaucacccccgagggggacgacaagccgggcgccgugggcaagguggucccguucuucgaggccaaggugguggaccuggacaccggcaagacccugggcgugaaccagcggggcgagcugugcgugcgggggccgaugaucaugagcggcuacgugaacaacccggaggccaccaacgcccucaucgacaaggacggcuggcugcacagcggcgacaucgccuacugggacgaggacgagcacuucuucaucgucgaccggcugaagucgcugaucaaguacaagggcuaccagguggcgccggccgagcuggagagcauccugcuccagcaccccaacaucuucgacgccggcguggccgggcugccggacgacgacgccggcgagcugccggccgcggugguggugcuggagcacggcaagaccaugacggagaaggagaucgucgacuacguggccagccaggugaccaccgccaagaagcugcggggcggcgugguguucguggacgaggucccgaagggccugaccgggaagcucgacgcccggaagauccgcgagauccugaucaaggccaagaagggcggcaagaucgccgugugaggacuagugaagggaacacccaaauuuaauucagccuuaagcacaauuaauuaagagugaaacguaauuguacaagcaguuggucacccaccauagggcaugaucaacaccgcaaccuuuccuuuuucccccagugauucugaaaaaccccucuucccuucagcuugcuuagauguuccaaauuuaguaagcuuaaggcggccuacagaagaaaaagaaaaaaaaggccacaaaaguucccucucacuuucaguaaauaaaauaaaagcagcaacagaaauaaagaaauaaaugaaauucaaaaugaaauaaauauuguguugugcagcauuaaaaaaucaauaaaaauuaaaaaugagcaagaucuaaaaaaaaaaaaaaaaaaaaaaaaaaaaaaaaaaaaaaaaaaaaaaaaaaaaaaaaaaaaaaaaugcaucccccccccccccccccccccccccccccccaaaggcucuuuucagagccaccagaauu

SEQ ID NO: 129 - RNA, 2179 nt, Artificial Sequence
  mRNA product ATP5A1_PpLuc(GC)_Gnas_A64
gggagagcggcucggccauuuugucccagucaguccggaggcugcggcugcagaaguaccgccugcggaguaacugcaaagaagcuuaccauggaggacgccaagaacaucaagaagggcccggcgcccuucuacccgcuggaggacgggaccgccggcgagcagcuccacaaggccaugaagcgguacgcccuggugccgggcacgaucgccuucaccgacgcccacaucgaggucgacaucaccuacgcggaguacuucgagaugagcgugcgccuggccgaggccaugaagcgguacggccugaacaccaaccaccggaucguggugugcucggagaacagccugcaguucuucaugccggugcugggcgcccucuucaucggcguggccgucgccccggcgaacgacaucuacaacgagcgggagcugcugaacagcauggggaucagccagccgaccgugguguucgugagcaagaagggccugcagaagauccugaacgugcagaagaagcugcccaucauccagaagaucaucaucauggacagcaagaccgacuaccagggcuuccagucgauguacacguucgugaccagccaccucccgccgggcuucaacgaguacgacuucgucccggagagcuucgaccgggacaagaccaucgcccugaucaugaacagcagcggcagcaccggccugccgaaggggguggcccugccgcaccggaccgccugcgugcgcuucucgcacgcccgggaccccaucuucggcaaccagaucaucccggacaccgccauccugagcguggugccguuccaccacggcuucggcauguucacgacccugggcuaccucaucugcggcuuccgggugguccugauguaccgguucgaggaggagcuguuccugcggagccugcaggacuacaagauccagagcgcgcugcucgugccgacccuguucagcuucuucgccaagagcacccugaucgacaaguacgaccugucgaaccugcacgagaucgccagcgggggcgccccgcugagcaaggaggugggcgaggccguggccaagcgguuccaccucccgggcauccgccagggcuacggccugaccgagaccacgagcgcgauccugaucacccccgagggggacgacaagccgggcgccgugggcaagguggucccguucuucgaggccaaggugguggaccuggacaccggcaagacccugggcgugaaccagcggggcgagcugugcgugcgggggccgaugaucaugagcggcuacgugaacaacccggaggccaccaacgcccucaucgacaaggacggcuggcugcacagcggcgacaucgccuacugggacgaggacgagcacuucuucaucgucgaccggcugaagucgcugaucaaguacaagggcuaccagguggcgccggccgagcuggagagcauccugcuccagcaccccaacaucuucgacgccggcguggccgggcugccggacgacgacgccggcgagcugccggccgcggugguggugcuggagcacggcaagaccaugacggagaaggagaucgucgacuacguggccagccaggugaccaccgccaagaagcugcggggcggcgugguguucguggacgaggucccgaagggccugaccgggaagcucgacgcccggaagauccgcgagauccugaucaaggccaagaagggcggcaagaucgccgugugaggacuagugaagggaacacccaaauuuaauucagccuuaagcacaauuaauuaagagugaaacguaauuguacaagcaguuggucacccaccauagggcaugaucaacaccgcaaccuuuccuuuuucccccagugauucugaaaaaccccucuucccuucagcuugcuuagauguuccaaauuuaguaagcuuaaggcggccuacagaagaaaaagaaaaaaaaggccacaaaaguucccucucacuuucaguaaauaaaauaaaagcagcaacagaaauaaagaaauaaaugaaauucaaaaugaaauaaauauuguguugugcagcauuaaaaaaucaauaaaaauuaaaaaugagcaagaucuaaaaaaaaaaaaaaaaaaaaaaaaaaaaaaaaaaaaaaaaaaaaaaaaaaaaaaaaaaaaaaaagaauu

SEQ ID NO: 130 - RNA, 2247 nt, Artificial Sequence
  mRNA product ATP5A1_protein of interest example 5_Gnas_A64-C30-histoneSL
  misc_feature (91)..(1752): n is a, c, g, or u
gggagagcggcucggccauuuugucccagucaguccggaggcugcggcugcagaaguaccgccugcggaguaacugcaaagaagcuuaccnnnnnnnnnnnnnnnnnnnnnnnnnnnnnnnnnnnnnnnnnnnnnnnnnnnnnnnnnnnnnnnnnnnnnnnnnnnnnnnnnnnnnnnnnnnnnnnnnnnnnnnnnnnnnnnnnnnnnnnnnnnnnnnnnnnnnnnnnnnnnnnnnnnnnnnnnnnnnnnnnnnnnnnnnnnnnnnnnnnnnnnnnnnnnnnnnnnnnnnnnnnnnnnnnnnnnnnnnnnnnnnnnnnnnnnnnnnnnnnnnnnnnnnnnnnnnnnnnnnnnnnnnnnnnnnnnnnnnnnnnnnnnnnnnnnnnnnnnnnnnnnnnnnnnnnnnnnnnnnnnnnnnnnnnnnnnnnnnnnnnnnnnnnnnnnnnnnnnnnnnnnnnnnnnnnnnnnnnnnnnnnnnnnnnnnnnnnnnnnnnnnnnnnnnnnnnnnnnnnnnnnnnnnnnnnnnnnnnnnnnnnnnnnnnnnnnnnnnnnnnnnnnnnnnnnnnnnnnnnnnnnnnnnnnnnnnnnnnnnnnnnnnnnnnnnnnnnnnnnnnnnnnnnnnnnnnnnnnnnnnnnnnnnnnnnnnnnnnnnnnnnnnnnnnnnnnnnnnnnnnnnnnnnnnnnnnnnnnnnnnnnnnnnnnnnnnnnnnnnnnnnnnnnnnnnnnnnnnnnnnnnnnnnnnnnnnnnnnnnnnnnnnnnnnnnnnnnnnnnnnnnnnnnnnnnnnnnnnnnnnnnnnnnnnnnnnnnnnnnnnnnnnnnnnnnnnnnnnnnnnnnnnnnnnnnnnnnnnnnnnnnnnnnnnnnnnnnnnnnnnnnnnnnnnnnnnnnnnnnnnnnnnnnnnnnnnnnnnnnnnnnnnnnnnnnnnnnnnnnnnnnnnnnnnnnnnnnnnnnnnnnnnnnnnnnnnnnnnnnnnnnnnnnnnnnnnnnnnnnnnnnnnnnnnnnnnnnnnnnnnnnnnnnnnnnnnnnnnnnnnnnnnnnnnnnnnnnnnnnnnnnnnnnnnnnnnnnnnnnnnnnnnnnnnnnnnnnnnnnnnnnnnnnnnnnnnnnnnnnnnnnnnnnnnnnnnnnnnnnnnnnnnnnnnnnnnnnnnnnnnnnnnnnnnnnnnnnnnnnnnnnnnnnnnnnnnnnnnnnnnnnnnnnnnnnnnnnnnnnnnnnnnnnnnnnnnnnnnnnnnnnnnnnnnnnnnnnnnnnnnnnnnnnnnnnnnnnnnnnnnnnnnnnnnnnnnnnnnnnnnnnnnnnnnnnnnnnnnnnnnnnnnnnnnnnnnnnnnnnnnnnnnnnnnnnnnnnnnnnnnnnnnnnnnnnnnnnnnnnnnnnnnnnnnnnnnnnnnnnnnnnnnnnnnnnnnnnnnnnnnnnnnnnnnnnnnnnnnnnnnnnnnnnnnnnnnnnnnnnnnnnnnnnnnnnnnnnnnnnnnnnnnnnnnnnnnnnnnnnnnnnnnnnnnnnnnnnnnnnnnnnnnnnnnnnnnnnnnnnnnnnnnnnnnnnnnnnnnnnnnnnnnnnnnnnnnnnnnnnnnnnnnnnnnnnnnnnnnnnnnnnnnnnnnnnnnnnnnnnnnnnnnnnnnnnnnnnnnnnnnnnnnnnnnnnnnnnnnnnnnnnnnnnnnnnnnnnnnnnnnnnnnnnnnnnnnnnnnnnnnnnnnnnnnnnnnnnnnnnnnnnnnnnnnnnnnnnnnnnnnnnnnnnnnnnnnnnnnnnnnnggacuagugaagggaacacccaaauuuaauucagccuuaagcacaauuaauuaagagugaaacguaauuguacaagcaguuggucacccaccauagggcaugaucaacaccgcaaccuuuccuuuuucccccagugauucugaaaaaccccucuucccuucagcuugcuuagauguuccaaauuuaguaagcuuaaggcggccuacagaagaaaaagaaaaaaaaggccacaaaaguucccucucacuuucaguaaauaaaauaaaagcagcaacagaaauaaagaaauaaaugaaauucaaaaugaaauaaauauuguguugugcagcauuaaaaaaucaauaaaaauuaaaaaugagcaagaucuaaaaaaaaaaaaaaaaaaaaaaaaaaaaaaaaaaaaaaaaaaaaaaaaaaaaaaaaaaaaaaaaugcaucccccccccccccccccccccccccccccccaaaggcucuuuucagagccaccagaauu

SEQ ID NO: 131 - RNA, 1940 nt, Artificial Sequence
  mRNA product ATP5A1_RAV-G(GC)_Ndufa1_A64-C30-histoneSL
gggagagcggcucggccauuuugucccagucaguccggaggcugcggcugcagaaguaccgccugcggaguaacugcaaagaagcuuaccauggugccccaggcccuccuguucgucccgcugcugguguucccccucugcuucggcaaguuccccaucuacaccauccccgacaagcuggggccguggagccccaucgacauccaccaccuguccugccccaacaaccucguggucgaggacgagggcugcaccaaccugagcggguucuccuacauggagcugaaggugggcuacaucagcgccaucaagaugaacggguucacgugcaccggcguggucaccgaggcggagaccuacacgaacuucgugggcuacgugaccaccaccuucaagcggaagcacuuccgccccacgccggacgccugccgggccgccuacaacuggaagauggccggggacccccgcuacgaggagucccuccacaaccccuaccccgacuaccacuggcugcggaccgucaagaccaccaaggagagccuggugaucaucuccccgagcguggcggaccucgaccccuacgaccgcucccugcacagccgggucuuccccggcgggaacugcuccggcguggccgugagcuccacguacugcagcaccaaccacgacuacaccaucuggaugcccgagaacccgcgccuggggauguccugcgacaucuucaccaacagccggggcaagcgcgccuccaagggcagcgagacgugcggguucgucgacgagcggggccucuacaagucccugaagggggccugcaagcugaagcucugcggcgugcugggccugcgccucauggacgggaccuggguggcgaugcagaccagcaacgagaccaaguggugcccccccggccagcuggucaaccugcacgacuuccggagcgacgagaucgagcaccucgugguggaggagcuggucaagaagcgcgaggagugccuggacgcccucgaguccaucaugacgaccaagagcguguccuuccggcgccugagccaccuccggaagcuggugcccggguucggcaaggccuacaccaucuucaacaagacccugauggaggccgacgcccacuacaaguccguccgcacguggaacgagaucaucccgagcaaggggugccugcgggugggcggccgcugccacccccacgucaacgggguguucuucaacggcaucauccucgggcccgacggcaacgugcugauccccgagaugcaguccagccugcuccagcagcacauggagcugcuggucuccagcgugaucccgcucaugcacccccuggcggaccccuccaccguguucaagaacggggacgaggccgaggacuucgucgaggugcaccuccccgacgugcacgagcggaucagcggcgucgaccugggccugccgaacugggggaaguacgugcugcucuccgccggcgcccugaccgcccugaugcugaucaucuuccucaugaccugcuggcgccgggugaaccggagcgagcccacgcagcacaaccugcgcgggaccggccgggaggucuccgugaccccgcagagcgggaagaucaucuccagcugggaguccuacaagagcggcggcgagaccgggcugugaggacuaguggaagcauuuuccuggcugauuaaaagaaauuacucagcuauggucaucuguuccuguuagaaggcuaugcagcauauuauauacuaugcgcauguuaugaaaugcauaauaaaaaauuuuaaaaaaucuaaaagaucuaaaaaaaaaaaaaaaaaaaaaaaaaaaaaaaaaaaaaaaaaaaaaaaaaaaaaaaaaaaaaaaaugcaucccccccccccccccccccccccccccccccaaaggcucuuuucagagccaccagaauu

SEQ ID NO: 132 - RNA, 1881 nt, Artificial Sequence
  mRNA product ATP5A1_RAV-G(GC)_Ndufa1_A64
gggagagcggcucggccauuuugucccagucaguccggaggcugcggcugcagaaguaccgccugcggaguaacugcaaagaagcuuaccauggugccccaggcccuccuguucgucccgcugcugguguucccccucugcuucggcaaguuccccaucuacaccauccccgacaagcuggggccguggagccccaucgacauccaccaccuguccugccccaacaaccucguggucgaggacgagggcugcaccaaccugagcggguucuccuacauggagcugaaggugggcuacaucagcgccaucaagaugaacggguucacgugcaccggcguggucaccgaggcggagaccuacacgaacuucgugggcuacgugaccaccaccuucaagcggaagcacuuccgccccacgccggacgccugccgggccgccuacaacuggaagauggccggggacccccgcuacgaggagucccuccacaaccccuaccccgacuaccacuggcugcggaccgucaagaccaccaaggagagccuggugaucaucuccccgagcguggcggaccucgaccccuacgaccgcucccugcacagccgggucuuccccggcgggaacugcuccggcguggccgugagcuccacguacugcagcaccaaccacgacuacaccaucuggaugcccgagaacccgcgccuggggauguccugcgacaucuucaccaacagccggggcaagcgcgccuccaagggcagcgagacgugcggguucgucgacgagcggggccucuacaagucccugaagggggccugcaagcugaagcucugcggcgugcugggccugcgccucauggacgggaccuggguggcgaugcagaccagcaacgagaccaaguggugcccccccggccagcuggucaaccugcacgacuuccggagcgacgagaucgagcaccucgugguggaggagcuggucaagaagcgcgaggagugccuggacgcccucgaguccaucaugacgaccaagagcguguccuuccggcgccugagccaccuccggaagcuggugcccggguucggcaaggccuacaccaucuucaacaagacccugauggaggccgacgcccacuacaaguccguccgcacguggaacgagaucaucccgagcaaggggugccugcgggugggcggccgcugccacccccacgucaacgggguguucuucaacggcaucauccucgggcccgacggcaacgugcugauccccgagaugcaguccagccugcuccagcagcacauggagcugcuggucuccagcgugaucccgcucaugcacccccuggcggaccccuccaccguguucaagaacggggacgaggccgaggacuucgucgaggugcaccuccccgacgugcacgagcggaucagcggcgucgaccugggccugccgaacugggggaaguacgugcugcucuccgccggcgcccugaccgcccugaugcugaucaucuuccucaugaccugcuggcgccgggugaaccggagcgagcccacgcagcacaaccugcgcgggaccggccgggaggucuccgugaccccgcagagcgggaagaucaucuccagcugggaguccuacaagagcggcggcgagaccgggcugugaggacuaguggaagcauuuuccuggcugauuaaaagaaauuacucagcuauggucaucuguuccuguuagaaggcuaugcagcauauuauauacuaugcgcauguuaugaaaugcauaauaaaaaauuuuaaaaaaucuaaaagaucuaaaaaaaaaaaaaaaaaaaaaaaaaaaaaaaaaaaaaaaaaaaaaaaaaaaaaaaaaaaaaaaagaauu

SEQ ID NO: 133 - RNA, 947 nt, Artificial Sequence
  mRNA product ATP5A1_HsEPO(GC)_Ndufa1_A64-C30-histoneSL
gggagagcggcucggccauuuugucccagucaguccggaggcugcggcugcagaaguaccgccugcggaguaacugcaaagaagcuuaccaugggcgugcacgagugccccgccuggcuguggcuccugcugagccuccugucccugccgcucgggcugcccguccugggcgcccccccgcggcucaucugcgacagccgcgugcuggagcgguaccugcucgaggcgaaggaggccgagaacaucaccaccgggugcgccgagcacugcucccugaacgagaacaucacggugccggacaccaaggucaacuucuacgccuggaagcgcauggaggugggccagcaggccguggaggucuggcaggggcuggcgcuccugagcgaggccgugcugcggggccaggcccuccuggugaacuccagccagcccugggagccccugcagcuccacgucgacaaggccguguccggccugcgcagccugaccacccuccugcgggcgcugggggcccagaaggaggccaucucccccccggacgccgccagcgcggccccgcuccgcacgaucaccgccgacaccuuccggaagcuguuccgcguguacuccaacuuccugcggggcaagcucaagcuguacaccggggaggccugccgcacgggcgaccggugaggacuaguggaagcauuuuccuggcugauuaaaagaaauuacucagcuauggucaucuguuccuguuagaaggcuaugcagcauauuauauacuaugcgcauguuaugaaaugcauaauaaaaaauuuuaaaaaaucuaaaagaucuaaaaaaaaaaaaaaaaaaaaaaaaaaaaaaaaaaaaaaaaaaaaaaaaaaaaaaaaaaaaaaaaugcaucccccccccccccccccccccccccccccccaaaggcucuuuucagagccaccagaauu

SEQ ID NO: 134 - RNA, 888 nt, Artificial Sequence
  mRNA product ATP5A1_HsEPO(GC)_Ndufa1_A64
gggagagcggcucggccauuuugucccagucaguccggaggcugcggcugcagaaguaccgccugcggaguaacugcaaagaagcuuaccaugggcgugcacgagugccccgccuggcuguggcuccugcugagccuccugucccugccgcucgggcugcccguccugggcgcccccccgcggcucaucugcgacagccgcgugcuggagcgguaccugcucgaggcgaaggaggccgagaacaucaccaccgggugcgccgagcacugcucccugaacgagaacaucacggugccggacaccaaggucaacuucuacgccuggaagcgcauggaggugggccagcaggccguggaggucuggcaggggcuggcgcuccugagcgaggccgugcugcggggccaggcccuccuggugaacuccagccagcccugggagccccugcagcuccacgucgacaaggccguguccggccugcgcagccugaccacccuccugcgggcgcugggggcccagaaggaggccaucucccccccggacgccgccagcgcggccccgcuccgcacgaucaccgccgacaccuuccggaagcuguuccgcguguacuccaacuuccugcggggcaagcucaagcuguacaccggggaggccugccgcacgggcgaccggugaggacuaguggaagcauuuuccuggcugauuaaaagaaauuacucagcuauggucaucuguuccuguuagaaggcuaugcagcauauuauauacuaugcgcauguuaugaaaugcauaauaaaaaauuuuaaaaaaucuaaaagaucuaaaaaaaaaaaaaaaaaaaaaaaaaaaaaaaaaaaaaaaaaaaaaaaaaaaaaaaaaaaaaaaagaauu

SEQ ID NO: 135 - RNA, 2018 nt, Artificial Sequence
  mRNA product ATP5A1_PpLuc(GC)_Ndufa1_A64-C30-histoneSL
gggagagcggcucggccauuuugucccagucaguccggaggcugcggcugcagaaguaccgccugcggaguaacugcaaagaagcuuaccauggaggacgccaagaacaucaagaagggcccggcgcccuucuacccgcuggaggacgggaccgccggcgagcagcuccacaaggccaugaagcgguacgcccuggugccgggcacgaucgccuucaccgacgcccacaucgaggucgacaucaccuacgcggaguacuucgagaugagcgugcgccuggccgaggccaugaagcgguacggccugaacaccaaccaccggaucguggugugcucggagaacagccugcaguucuucaugccggugcugggcgcccucuucaucggcguggccgucgccccggcgaacgacaucuacaacgagcgggagcugcugaacagcauggggaucagccagccgaccgugguguucgugagcaagaagggccugcagaagauccugaacgugcagaagaagcugcccaucauccagaagaucaucaucauggacagcaagaccgacuaccagggcuuccagucgauguacacguucgugaccagccaccucccgccgggcuucaacgaguacgacuucgucccggagagcuucgaccgggacaagaccaucgcccugaucaugaacagcagcggcagcaccggccugccgaaggggguggcccugccgcaccggaccgccugcgugcgcuucucgcacgcccgggaccccaucuucggcaaccagaucaucccggacaccgccauccugagcguggugccguuccaccacggcuucggcauguucacgacccugggcuaccucaucugcggcuuccgggugguccugauguaccgguucgaggaggagcuguuccugcggagccugcaggacuacaagauccagagcgcgcugcucgugccgacccuguucagcuucuucgccaagagcacccugaucgacaaguacgaccugucgaaccugcacgagaucgccagcgggggcgccccgcugagcaaggaggugggcgaggccguggccaagcgguuccaccucccgggcauccgccagggcuacggccugaccgagaccacgagcgcgauccugaucacccccgagggggacgacaagccgggcgccgugggcaagguggucccguucuucgaggccaaggugguggaccuggacaccggcaagacccugggcgugaaccagcggggcgagcugugcgugcgggggccgaugaucaugagcggcuacgugaacaacccggaggccaccaacgcccucaucgacaaggacggcuggcugcacagcggcgacaucgccuacugggacgaggacgagcacuucuucaucgucgaccggcugaagucgcugaucaaguacaagggcuaccagguggcgccggccgagcuggagagcauccugcuccagcaccccaacaucuucgacgccggcguggccgggcugccggacgacgacgccggcgagcugccggccgcggugguggugcuggagcacggcaagaccaugacggagaaggagaucgucgacuacguggccagccaggugaccaccgccaagaagcugcggggcggcgugguguucguggacgaggucccgaagggccugaccgggaagcucgacgcccggaagauccgcgagauccugaucaaggccaagaagggcggcaagaucgccgugugaggacuaguggaagcauuuuccuggcugauuaaaagaaauuacucagcuauggucaucuguuccuguuagaaggcuaugcagcauauuauauacuaugcgcauguuaugaaaugcauaauaaaaaauuuuaaaaaaucuaaaagaucuaaaaaaaaaaaaaaaaaaaaaaaaaaaaaaaaaaaaaaaaaaaaaaaaaaaaaaaaaaaaaaaaugcaucccccccccccccccccccccccccccccccaaaggcucuuuucagagccaccagaauu

SEQ ID NO: 136 - RNA, 1959 nt, Artificial Sequence
  mRNA product ATP5A1_PpLuc(GC)_Ndufa1_A64
gggagagcggcucggccauuuugucccagucaguccggaggcugcggcugcagaaguaccgccugcggaguaacugcaaagaagcuuaccauggaggacgccaagaacaucaagaagggcccggcgcccuucuacccgcuggaggacgggaccgccggcgagcagcuccacaaggccaugaagcgguacgcccuggugccgggcacgaucgccuucaccgacgcccacaucgaggucgacaucaccuacgcggaguacuucgagaugagcgugcgccuggccgaggccaugaagcgguacggccugaacaccaaccaccggaucguggugugcucggagaacagccugcaguucuucaugccggugcugggcgcccucuucaucggcguggccgucgccccggcgaacgacaucuacaacgagcgggagcugcugaacagcauggggaucagccagccgaccgugguguucgugagcaagaagggccugcagaagauccugaacgugcagaagaagcugcccaucauccagaagaucaucaucauggacagcaagaccgacuaccagggcuuccagucgauguacacguucgugaccagccaccucccgccgggcuucaacgaguacgacuucgucccggagagcuucgaccgggacaagaccaucgcccugaucaugaacagcagcggcagcaccggccugccgaaggggguggcccugccgcaccggaccgccugcgugcgcuucucgcacgcccgggaccccaucuucggcaaccagaucaucccggacaccgccauccugagcguggugccguuccaccacggcuucggcauguucacgacccugggcuaccucaucugcggcuuccgggugguccugauguaccgguucgaggaggagcuguuccugcggagccugcaggacuacaagauccagagcgcgcugcucgugccgacccuguucagcuucuucgccaagagcacccugaucgacaaguacgaccugucgaaccugcacgagaucgccagcgggggcgccccgcugagcaaggaggugggcgaggccguggccaagcgguuccaccucccgggcauccgccagggcuacggccugaccgagaccacgagcgcgauccugaucacccccgagggggacgacaagccgggcgccgugggcaagguggucccguucuucgaggccaaggugguggaccuggacaccggcaagacccugggcgugaaccagcggggcgagcugugcgugcgggggccgaugaucaugagcggcuacgugaacaacccggaggccaccaacgcccucaucgacaaggacggcuggcugcacagcggcgacaucgccuacugggacgaggacgagcacuucuucaucgucgaccggcugaagucgcugaucaaguacaagggcuaccagguggcgccggccgagcuggagagcauccugcuccagcaccccaacaucuucgacgccggcguggccgggcugccggacgacgacgccggcgagcugccggccgcggugguggugcuggagcacggcaagaccaugacggagaaggagaucgucgacuacguggccagccaggugaccaccgccaagaagcugcggggcggcgugguguucguggacgaggucccgaagggccugaccgggaagcucgacgcccggaagauccgcgagauccugaucaaggccaagaagggcggcaagaucgccgugugaggacuaguggaagcauuuuccuggcugauuaaaagaaauuacucagcuauggucaucuguuccuguuagaaggcuaugcagcauauuauauacuaugcgcauguuaugaaaugcauaauaaaaaauuuuaaaaaaucuaaaagaucuaaaaaaaaaaaaaaaaaaaaaaaaaaaaaaaaaaaaaaaaaaaaaaaaaaaaaaaaaaaaaaaagaauu

SEQ ID NO: 137 - RNA, 2027 nt, Artificial Sequence
  mRNA product ATP5A1_protein of interest example 5_Ndufa1_A64-C30-histoneSL
  misc_feature (91)..(1752): n is a, c, g, or u
gggagagcggcucggccauuuugucccagucaguccggaggcugcggcugcagaaguaccgccugcggaguaacugcaaagaagcuuaccnnnnnnnnnnnnnnnnnnnnnnnnnnnnnnnnnnnnnnnnnnnnnnnnnnnnnnnnnnnnnnnnnnnnnnnnnnnnnnnnnnnnnnnnnnnnnnnnnnnnnnnnnnnnnnnnnnnnnnnnnnnnnnnnnnnnnnnnnnnnnnnnnnnnnnnnnnnnnnnnnnnnnnnnnnnnnnnnnnnnnnnnnnnnnnnnnnnnnnnnnnnnnnnnnnnnnnnnnnnnnnnnnnnnnnnnnnnnnnnnnnnnnnnnnnnnnnnnnnnnnnnnnnnnnnnnnnnnnnnnnnnnnnnnnnnnnnnnnnnnnnnnnnnnnnnnnnnnnnnnnnnnnnnnnnnnnnnnnnnnnnnnnnnnnnnnnnnnnnnnnnnnnnnnnnnnnnnnnnnnnnnnnnnnnnnnnnnnnnnnnnnnnnnnnnnnnnnnnnnnnnnnnnnnnnnnnnnnnnnnnnnnnnnnnnnnnnnnnnnnnnnnnnnnnnnnnnnnnnnnnnnnnnnnnnnnnnnnnnnnnnnnnnnnnnnnnnnnnnnnnnnnnnnnnnnnnnnnnnnnnnnnnnnnnnnnnnnnnnnnnnnnnnnnnnnnnnnnnnnnnnnnnnnnnnnnnnnnnnnnnnnnnnnnnnnnnnnnnnnnnnnnnnnnnnnnnnnnnnnnnnnnnnnnnnnnnnnnnnnnnnnnnnnnnnnnnnnnnnnnnnnnnnnnnnnnnnnnnnnnnnnnnnnnnnnnnnnnnnnnnnnnnnnnnnnnnnnnnnnnnnnnnnnnnnnnnnnnnnnnnnnnnnnnnnnnnnnnnnnnnnnnnnnnnnnnnnnnnnnnnnnnnnnnnnnnnnnnnnnnnnnnnnnnnnnnnnnnnnnnnnnnnnnnnnnnnnnnnnnnnnnnnnnnnnnnnnnnnnnnnnnnnnnnnnnnnnnnnnnnnnnnnnnnnnnnnnnnnnnnnnnnnnnnnnnnnnnnnnnnnnnnnnnnnnnnnnnnnnnnnnnnnnnnnnnnnnnnnnnnnnnnnnnnnnnnnnnnnnnnnnnnnnnnnnnnnnnnnnnnnnnnnnnnnnnnnnnnnnnnnnnnnnnnnnnnnnnnnnnnnnnnnnnnnnnnnnnnnnnnnnnnnnnnnnnnnnnnnnnnnnnnnnnnnnnnnnnnnnnnnnnnnnnnnnnnnnnnnnnnnnnnnnnnnnnnnnnnnnnnnnnnnnnnnnnnnnnnnnnnnnnnnnnnnnnnnnnnnnnnnnnnnnnnnnnnnnnnnnnnnnnnnnnnnnnnnnnnnnnnnnnnnnnnnnnnnnnnnnnnnnnnnnnnnnnnnnnnnnnnnnnnnnnnnnnnnnnnnnnnnnnnnnnnnnnnnnnnnnnnnnnnnnnnnnnnnnnnnnnnnnnnnnnnnnnnnnnnnnnnnnnnnnnnnnnnnnnnnnnnnnnnnnnnnnnnnnnnnnnnnnnnnnnnnnnnnnnnnnnnnnnnnnnnnnnnnnnnnnnnnnnnnnnnnnnnnnnnnnnnnnnnnnnnnnnnnnnnnnnnnnnnnnnnnnnnnnnnnnnnnnnnnnnnnnnnnnnnnnnnnnnnnnnnnnnnnnnnnnnnnnnnnnnnnnnnnnnnnnnnnnnnnnnnnnnnnnnnnnnnnnnnnnnnnnnnnnnnnnnnnnnnnnnnnnnnnnnnnnnnnnnnnnnnnnnnnnnnnnnnnnnnnnnnnnnnnnnnnnnnnnggacuaguggaagcauuuuccuggcugauuaaaagaaauuacucagcuauggucaucuguuccuguuagaaggcuaugcagcauauuauauacuaugcgcauguuaugaaaugcauaauaaaaaauuuuaaaaaaucuaaaagaucuaaaaaaaaaaaaaaaaaaaaaaaaaaaaaaaaaaaaaaaaaaaaaaaaaaaaaaaaaaaaaaaaugcaucccccccccccccccccccccccccccccccaaaggcucuuuucagagccaccagaauu

SEQ ID NO: 138 - RNA, 1877 nt, Artificial Sequence
  mRNA product ATP5A1_RAV-G(GC)_RPS9_A64-C30-histoneSL
gggagagcggcucggccauuuugucccagucaguccggaggcugcggcugcagaaguaccgccugcggaguaacugcaaagaagcuuaccauggugccccaggcccuccuguucgucccgcugcugguguucccccucugcuucggcaaguuccccaucuacaccauccccgacaagcuggggccguggagccccaucgacauccaccaccuguccugccccaacaaccucguggucgaggacgagggcugcaccaaccugagcggguucuccuacauggagcugaaggugggcuacaucagcgccaucaagaugaacggguucacgugcaccggcguggucaccgaggcggagaccuacacgaacuucgugggcuacgugaccaccaccuucaagcggaagcacuuccgccccacgccggacgccugccgggccgccuacaacuggaagauggccggggacccccgcuacgaggagucccuccacaaccccuaccccgacuaccacuggcugcggaccgucaagaccaccaaggagagccuggugaucaucuccccgagcguggcggaccucgaccccuacgaccgcucccugcacagccgggucuuccccggcgggaacugcuccggcguggccgugagcuccacguacugcagcaccaaccacgacuacaccaucuggaugcccgagaacccgcgccuggggauguccugcgacaucuucaccaacagccggggcaagcgcgccuccaagggcagcgagacgugcggguucgucgacgagcggggccucuacaagucccugaagggggccugcaagcugaagcucugcggcgugcugggccugcgccucauggacgggaccuggguggcgaugcagaccagcaacgagaccaaguggugcccccccggccagcuggucaaccugcacgacuuccggagcgacgagaucgagcaccucgugguggaggagcuggucaagaagcgcgaggagugccuggacgcccucgaguccaucaugacgaccaagagcguguccuuccggcgccugagccaccuccggaagcuggugcccggguucggcaaggccuacaccaucuucaacaagacccugauggaggccgacgcccacuacaaguccguccgcacguggaacgagaucaucccgagcaaggggugccugcgggugggcggccgcugccacccccacgucaacgggguguucuucaacggcaucauccucgggcccgacggcaacgugcugauccccgagaugcaguccagccugcuccagcagcacauggagcugcuggucuccagcgugaucccgcucaugcacccccuggcggaccccuccaccguguucaagaacggggacgaggccgaggacuucgucgaggugcaccuccccgacgugcacgagcggaucagcggcgucgaccugggccugccgaacugggggaaguacgugcugcucuccgccggcgcccugaccgcccugaugcugaucaucuuccucaugaccugcuggcgccgggugaaccggagcgagcccacgcagcacaaccugcgcgggaccggccgggaggucuccgugaccccgcagagcgggaagaucaucuccagcugggaguccuacaagagcggcggcgagaccgggcugugaggacuaguguccaccugucccuccugggcugcuggauugucucguuuuccugccaaauaaacaggaucagcgcuuuacagaucuaaaaaaaaaaaaaaaaaaaaaaaaaaaaaaaaaaaaaaaaaaaaaaaaaaaaaaaaaaaaaaaaugcaucccccccccccccccccccccccccccccccaaaggcucuuuucagagccaccagaauu

SEQ ID NO: 139 - RNA, 1818 nt, Artificial Sequence
  mRNA product ATP5A1_RAV-G(GC)_RPS9_A64
gggagagcggcucggccauuuugucccagucaguccggaggcugcggcugcagaaguaccgccugcggaguaacugcaaagaagcuuaccauggugccccaggcccuccuguucgucccgcugcugguguucccccucugcuucggcaaguuccccaucuacaccauccccgacaagcuggggccguggagccccaucgacauccaccaccuguccugccccaacaaccucguggucgaggacgagggcugcaccaaccugagcggguucuccuacauggagcugaaggugggcuacaucagcgccaucaagaugaacggguucacgugcaccggcguggucaccgaggcggagaccuacacgaacuucgugggcuacgugaccaccaccuucaagcggaagcacuuccgccccacgccggacgccugccgggccgccuacaacuggaagauggccggggacccccgcuacgaggagucccuccacaaccccuaccccgacuaccacuggcugcggaccgucaagaccaccaaggagagccuggugaucaucuccccgagcguggcggaccucgaccccuacgaccgcucccugcacagccgggucuuccccggcgggaacugcuccggcguggccgugagcuccacguacugcagcaccaaccacgacuacaccaucuggaugcccgagaacccgcgccuggggauguccugcgacaucuucaccaacagccggggcaagcgcgccuccaagggcagcgagacgugcggguucgucgacgagcggggccucuacaagucccugaagggggccugcaagcugaagcucugcggcgugcugggccugcgccucauggacgggaccuggguggcgaugcagaccagcaacgagaccaaguggugcccccccggccagcuggucaaccugcacgacuuccggagcgacgagaucgagcaccucgugguggaggagcuggucaagaagcgcgaggagugccuggacgcccucgaguccaucaugacgaccaagagcguguccuuccggcgccugagccaccuccggaagcuggugcccggguucggcaaggccuacaccaucuucaacaagacccugauggaggccgacgcccacuacaaguccguccgcacguggaacgagaucaucccgagcaaggggugccugcgggugggcggccgcugccacccccacgucaacgggguguucuucaacggcaucauccucgggcccgacggcaacgugcugauccccgagaugcaguccagccugcuccagcagcacauggagcugcuggucuccagcgugaucccgcucaugcacccccuggcggaccccuccaccguguucaagaacggggacgaggccgaggacuucgucgaggugcaccuccccgacgugcacgagcggaucagcggcgucgaccugggccugccgaacugggggaaguacgugcugcucuccgccggcgcccugaccgcccugaugcugaucaucuuccucaugaccugcuggcgccgggugaaccggagcgagcccacgcagcacaaccugcgcgggaccggccgggaggucuccgugaccccgcagagcgggaagaucaucuccagcugggaguccuacaagagcggcggcgagaccgggcugugaggacuaguguccaccugucccuccugggcugcuggauugucucguuuuccugccaaauaaacaggaucagcgcuuuacagaucuaaaaaaaaaaaaaaaaaaaaaaaaaaaaaaaaaaaaaaaaaaaaaaaaaaaaaaaaaaaaaaaagaauu

SEQ ID NO: 140 - RNA, 884 nt, Artificial Sequence
  mRNA product ATP5A1_HsEPO(GC)_RPS9_A64-C30-histoneSL
gggagagcggcucggccauuuugucccagucaguccggaggcugcggcugcagaaguaccgccugcggaguaacugcaaagaagcuuaccaugggcgugcacgagugccccgccuggcuguggcuccugcugagccuccugucccugccgcucgggcugcccguccugggcgcccccccgcggcucaucugcgacagccgcgugcuggagcgguaccugcucgaggcgaaggaggccgagaacaucaccaccgggugcgccgagcacugcucccugaacgagaacaucacggugccggacaccaaggucaacuucuacgccuggaagcgcauggaggugggccagcaggccguggaggucuggcaggggcuggcgcuccugagcgaggccgugcugcggggccaggcccuccuggugaacuccagccagcccugggagccccugcagcuccacgucgacaaggccguguccggccugcgcagccugaccacccuccugcgggcgcugggggcccagaaggaggccaucucccccccggacgccgccagcgcggccccgcuccgcacgaucaccgccgacaccuuccggaagcuguuccgcguguacuccaacuuccugcggggcaagcucaagcuguacaccggggaggccugccgcacgggcgaccggugaggacuaguguccaccugucccuccugggcugcuggauugucucguuuuccugccaaauaaacaggaucagcgcuuuacagaucuaaaaaaaaaaaaaaaaaaaaaaaaaaaaaaaaaaaaaaaaaaaaaaaaaaaaaaaaaaaaaaaaugcaucccccccccccccccccccccccccccccccaaaggcucuuuucagagccaccagaauu

SEQ ID NO: 141 - RNA, 825 nt, Artificial Sequence
  mRNA product ATP5A1_HsEPO(GC)_RPS9_A64
gggagagcggcucggccauuuugucccagucaguccggaggcugcggcugcagaaguaccgccugcggaguaacugcaaagaagcuuaccaugggcgugcacgagugccccgccuggcuguggcuccugcugagccuccugucccugccgcucgggcugcccguccugggcgcccccccgcggcucaucugcgacagccgcgugcuggagcgguaccugcucgaggcgaaggaggccgagaacaucaccaccgggugcgccgagcacugcucccugaacgagaacaucacggugccggacaccaaggucaacuucuacgccuggaagcgcauggaggugggccagcaggccguggaggucuggcaggggcuggcgcuccugagcgaggccgugcugcggggccaggcccuccuggugaacuccagccagcccugggagccccugcagcuccacgucgacaaggccguguccggccugcgcagccugaccacccuccugcgggcgcugggggcccagaaggaggccaucucccccccggacgccgccagcgcggccccgcuccgcacgaucaccgccgacaccuuccggaagcuguuccgcguguacuccaacuuccugcggggcaagcucaagcuguacaccggggaggccugccgcacgggcgaccggugaggacuaguguccaccugucccuccugggcugcuggauugucucguuuuccugccaaauaaacaggaucagcgcuuuacagaucuaaaaaaaaaaaaaaaaaaaaaaaaaaaaaaaaaaaaaaaaaaaaaaaaaaaaaaaaaaaaaaaagaauu

SEQ ID NO: 142 - RNA, 1955 nt, Artificial Sequence
  mRNA product ATP5A1_PpLuc(GC)_RPS9_A64-C30-histoneSL
gggagagcggcucggccauuuugucccagucaguccggaggcugcggcugcagaaguaccgccugcggaguaacugcaaagaagcuuaccauggaggacgccaagaacaucaagaagggcccggcgcccuucuacccgcuggaggacgggaccgccggcgagcagcuccacaaggccaugaagcgguacgcccuggugccgggcacgaucgccuucaccgacgcccacaucgaggucgacaucaccuacgcggaguacuucgagaugagcgugcgccuggccgaggccaugaagcgguacggccugaacaccaaccaccggaucguggugugcucggagaacagccugcaguucuucaugccggugcugggcgcccucuucaucggcguggccgucgccccggcgaacgacaucuacaacgagcgggagcugcugaacagcauggggaucagccagccgaccgugguguucgugagcaagaagggccugcagaagauccugaacgugcagaagaagcugcccaucauccagaagaucaucaucauggacagcaagaccgacuaccagggcuuccagucgauguacacguucgugaccagccaccucccgccgggcuucaacgaguacgacuucgucccggagagcuucgaccgggacaagaccaucgcccugaucaugaacagcagcggcagcaccggccugccgaaggggguggcccugccgcaccggaccgccugcgugcgcuucucgcacgcccgggaccccaucuucggcaaccagaucaucccggacaccgccauccugagcguggugccguuccaccacggcuucggcauguucacgacccugggcuaccucaucugcggcuuccgggugguccugauguaccgguucgaggaggagcuguuccugcggagccugcaggacuacaagauccagagcgcgcugcucgugccgacccuguucagcuucuucgccaagagcacccugaucgacaaguacgaccugucgaaccugcacgagaucgccagcgggggcgccccgcugagcaaggaggugggcgaggccguggccaagcgguuccaccucccgggcauccgccagggcuacggccugaccgagaccacgagcgcgauccugaucacccccgagggggacgacaagccgggcgccgugggcaagguggucccguucuucgaggccaaggugguggaccuggacaccggcaagacccugggcgugaaccagcggggcgagcugugcgugcgggggccgaugaucaugagcggcuacgugaacaacccggaggccaccaacgcccucaucgacaaggacggcuggcugcacagcggcgacaucgccuacugggacgaggacgagcacuucuucaucgucgaccggcugaagucgcugaucaaguacaagggcuaccagguggcgccggccgagcuggagagcauccugcuccagcaccccaacaucuucgacgccggcguggccgggcugccggacgacgacgccggcgagcugccggccgcggugguggugcuggagcacggcaagaccaugacggagaaggagaucgucgacuacguggccagccaggugaccaccgccaagaagcugcggggcggcgugguguucguggacgaggucccgaagggccugaccgggaagcucgacgcccggaagauccgcgagauccugaucaaggccaagaagggcggcaagaucgccgugugaggacuaguguccaccugucccuccugggcugcuggauugucucguuuuccugccaaauaaacaggaucagcgcuuuacagaucuaaaaaaaaaaaaaaaaaaaaaaaaaaaaaaaaaaaaaaaaaaaaaaaaaaaaaaaaaaaaaaaaugcaucccccccccccccccccccccccccccccccaaaggcucuuuucagagccaccagaauu

SEQ ID NO: 143 - RNA, 1896 nt, Artificial Sequence
  mRNA product ATP5A1_PpLuc(GC)_RPS9_A64
gggagagcggcucggccauuuugucccagucaguccggaggcugcggcugcagaaguaccgccugcggaguaacugcaaagaagcuuaccauggaggacgccaagaacaucaagaagggcccggcgcccuucuacccgcuggaggacgggaccgccggcgagcagcuccacaaggccaugaagcgguacgcccuggugccgggcacgaucgccuucaccgacgcccacaucgaggucgacaucaccuacgcggaguacuucgagaugagcgugcgccuggccgaggccaugaagcgguacggccugaacaccaaccaccggaucguggugugcucggagaacagccugcaguucuucaugccggugcugggcgcccucuucaucggcguggccgucgccccggcgaacgacaucuacaacgagcgggagcugcugaacagcauggggaucagccagccgaccgugguguucgugagcaagaagggccugcagaagauccugaacgugcagaagaagcugcccaucauccagaagaucaucaucauggacagcaagaccgacuaccagggcuuccagucgauguacacguucgugaccagccaccucccgccgggcuucaacgaguacgacuucgucccggagagcuucgaccgggacaagaccaucgcccugaucaugaacagcagcggcagcaccggccugccgaaggggguggcccugccgcaccggaccgccugcgugcgcuucucgcacgcccgggaccccaucuucggcaaccagaucaucccggacaccgccauccugagcguggugccguuccaccacggcuucggcauguucacgacccugggcuaccucaucugcggcuuccgggugguccugauguaccgguucgaggaggagcuguuccugcggagccugcaggacuacaagauccagagcgcgcugcucgugccgacccuguucagcuucuucgccaagagcacccugaucgacaaguacgaccugucgaaccugcacgagaucgccagcgggggcgccccgcugagcaaggaggugggcgaggccguggccaagcgguuccaccucccgggcauccgccagggcuacggccugaccgagaccacgagcgcgauccugaucacccccgagggggacgacaagccgggcgccgugggcaagguggucccguucuucgaggccaaggugguggaccuggacaccggcaagacccugggcgugaaccagcggggcgagcugugcgugcgggggccgaugaucaugagcggcuacgugaacaacccggaggccaccaacgcccucaucgacaaggacggcuggcugcacagcggcgacaucgccuacugggacgaggacgagcacuucuucaucgucgaccggcugaagucgcugaucaaguacaagggcuaccagguggcgccggccgagcuggagagcauccugcuccagcaccccaacaucuucgacgccggcguggccgggcugccggacgacgacgccggcgagcugccggccgcggugguggugcuggagcacggcaagaccaugacggagaaggagaucgucgacuacguggccagccaggugaccaccgccaagaagcugcggggcggcgugguguucguggacgaggucccgaagggccugaccgggaagcucgacgcccggaagauccgcgagauccugaucaaggccaagaagggcggcaagaucgccgugugaggacuaguguccaccugucccuccugggcugcuggauugucucguuuuccugccaaauaaacaggaucagcgcuuuacagaucuaaaaaaaaaaaaaaaaaaaaaaaaaaaaaaaaaaaaaaaaaaaaaaaaaaaaaaaaaaaaaaaagaauu

SEQ ID NO: 144 - RNA, 1964 nt, Artificial Sequence
  mRNA product ATP5A1_protein of interest example 5_RPS9_A64-C30-histoneSL
  misc_feature (91)..(1752): n is a, c, g, or u
gggagagcggcucggccauuuugucccagucaguccggaggcugcggcugcagaaguaccgccugcggaguaacugcaaagaagcuuaccnnnnnnnnnnnnnnnnnnnnnnnnnnnnnnnnnnnnnnnnnnnnnnnnnnnnnnnnnnnnnnnnnnnnnnnnnnnnnnnnnnnnnnnnnnnnnnnnnnnnnnnnnnnnnnnnnnnnnnnnnnnnnnnnnnnnnnnnnnnnnnnnnnnnnnnnnnnnnnnnnnnnnnnnnnnnnnnnnnnnnnnnnnnnnnnnnnnnnnnnnnnnnnnnnnnnnnnnnnnnnnnnnnnnnnnnnnnnnnnnnnnnnnnnnnnnnnnnnnnnnnnnnnnnnnnnnnnnnnnnnnnnnnnnnnnnnnnnnnnnnnnnnnnnnnnnnnnnnnnnnnnnnnnnnnnnnnnnnnnnnnnnnnnnnnnnnnnnnnnnnnnnnnnnnnnnnnnnnnnnnnnnnnnnnnnnnnnnnnnnnnnnnnnnnnnnnnnnnnnnnnnnnnnnnnnnnnnnnnnnnnnnnnnnnnnnnnnnnnnnnnnnnnnnnnnnnnnnnnnnnnnnnnnnnnnnnnnnnnnnnnnnnnnnnnnnnnnnnnnnnnnnnnnnnnnnnnnnnnnnnnnnnnnnnnnnnnnnnnnnnnnnnnnnnnnnnnnnnnnnnnnnnnnnnnnnnnnnnnnnnnnnnnnnnnnnnnnnnnnnnnnnnnnnnnnnnnnnnnnnnnnnnnnnnnnnnnnnnnnnnnnnnnnnnnnnnnnnnnnnnnnnnnnnnnnnnnnnnnnnnnnnnnnnnnnnnnnnnnnnnnnnnnnnnnnnnnnnnnnnnnnnnnnnnnnnnnnnnnnnnnnnnnnnnnnnnnnnnnnnnnnnnnnnnnnnnnnnnnnnnnnnnnnnnnnnnnnnnnnnnnnnnnnnnnnnnnnnnnnnnnnnnnnnnnnnnnnnnnnnnnnnnnnnnnnnnnnnnnnnnnnnnnnnnnnnnnnnnnnnnnnnnnnnnnnnnnnnnnnnnnnnnnnnnnnnnnnnnnnnnnnnnnnnnnnnnnnnnnnnnnnnnnnnnnnnnnnnnnnnnnnnnnnnnnnnnnnnnnnnnnnnnnnnnnnnnnnnnnnnnnnnnnnnnnnnnnnnnnnnnnnnnnnnnnnnnnnnnnnnnnnnnnnnnnnnnnnnnnnnnnnnnnnnnnnnnnnnnnnnnnnnnnnnnnnnnnnnnnnnnnnnnnnnnnnnnnnnnnnnnnnnnnnnnnnnnnnnnnnnnnnnnnnnnnnnnnnnnnnnnnnnnnnnnnnnnnnnnnnnnnnnnnnnnnnnnnnnnnnnnnnnnnnnnnnnnnnnnnnnnnnnnnnnnnnnnnnnnnnnnnnnnnnnnnnnnnnnnnnnnnnnnnnnnnnnnnnnnnnnnnnnnnnnnnnnnnnnnnnnnnnnnnnnnnnnnnnnnnnnnnnnnnnnnnnnnnnnnnnnnnnnnnnnnnnnnnnnnnnnnnnnnnnnnnnnnnnnnnnnnnnnnnnnnnnnnnnnnnnnnnnnnnnnnnnnnnnnnnnnnnnnnnnnnnnnnnnnnnnnnnnnnnnnnnnnnnnnnnnnnnnnnnnnnnnnnnnnnnnnnnnnnnnnnnnnnnnnnnnnnnnnnnnnnnnnnnnnnnnnnnnnnnnnnnnnnnnnnnnnnnnnnnnnnnnnnnnnnnnnnnnnnnnnnnnnnnnnnnnnnnnnnnnnnnnnnnnnnnnnnnnnnnnnnnnnnnnnnnnnnnnnnnnnnnnnnnnnnnnnnnggacuaguguccaccugucccuccugggcugcuggauugucucguuuuccugccaaauaaacaggaucagcgcuuuacagaucuaaaaaaaaaaaaaaaaaaaaaaaaaaaaaaaaaaaaaaaaaaaaaaaaaaaaaaaaaaaaaaaaugcaucccccccccccccccccccccccccccccccaaaggcucuuuucagagccaccagaauu

SEQ ID NO: 145 - RNA, 1843 nt, Artificial Sequence
  mRNA product Mp68_(2010107E04Rik)_RAV-G(GC)_PSMB3_A64-C30-histoneSL
gggagacuuucccauucuguagcagaauuugguguugccuguggucuuggucccgcggagaagcuuaccauggugccccaggcccuccuguucgucccgcugcugguguucccccucugcuucggcaaguuccccaucuacaccauccccgacaagcuggggccguggagccccaucgacauccaccaccuguccugccccaacaaccucguggucgaggacgagggcugcaccaaccugagcggguucuccuacauggagcugaaggugggcuacaucagcgccaucaagaugaacggguucacgugcaccggcguggucaccgaggcggagaccuacacgaacuucgugggcuacgugaccaccaccuucaagcggaagcacuuccgccccacgccggacgccugccgggccgccuacaacuggaagauggccggggacccccgcuacgaggagucccuccacaaccccuaccccgacuaccacuggcugcggaccgucaagaccaccaaggagagccuggugaucaucuccccgagcguggcggaccucgaccccuacgaccgcucccugcacagccgggucuuccccggcgggaacugcuccggcguggccgugagcuccacguacugcagcaccaaccacgacuacaccaucuggaugcccgagaacccgcgccuggggauguccugcgacaucuucaccaacagccggggcaagcgcgccuccaagggcagcgagacgugcggguucgucgacgagcggggccucuacaagucccugaagggggccugcaagcugaagcucugcggcgugcugggccugcgccucauggacgggaccuggguggcgaugcagaccagcaacgagaccaaguggugcccccccggccagcuggucaaccugcacgacuuccggagcgacgagaucgagcaccucgugguggaggagcuggucaagaagcgcgaggagugccuggacgcccucgaguccaucaugacgaccaagagcguguccuuccggcgccugagccaccuccggaagcuggugcccggguucggcaaggccuacaccaucuucaacaagacccugauggaggccgacgcccacuacaaguccguccgcacguggaacgagaucaucccgagcaaggggugccugcgggugggcggccgcugccacccccacgucaacgggguguucuucaacggcaucauccucgggcccgacggcaacgugcugauccccgagaugcaguccagccugcuccagcagcacauggagcugcuggucuccagcgugaucccgcucaugcacccccuggcggaccccuccaccguguucaagaacggggacgaggccgaggacuucgucgaggugcaccuccccgacgugcacgagcggaucagcggcgucgaccugggccugccgaacugggggaaguacgugcugcucuccgccggcgcccugaccgcccugaugcugaucaucuuccucaugaccugcuggcgccgggugaaccggagcgagcccacgcagcacaaccugcgcgggaccggccgggaggucuccgugaccccgcagagcgggaagaucaucuccagcugggaguccuacaagagcggcggcgagaccgggcugugaggacuagucccuguucccagagcccacuuuuuuuucuuuuuuugaaauaaaauagccugucuuucagaucuaaaaaaaaaaaaaaaaaaaaaaaaaaaaaaaaaaaaaaaaaaaaaaaaaaaaaaaaaaaaaaaaugcaucccccccccccccccccccccccccccccccaaaggcucuuuucagagccaccagaauu

SEQ ID NO: 146 - RNA, 1784 nt, Artificial Sequence
  mRNA product Mp68_(2010107E04Rik)_RAV-G(GC)_PSMB3_A64
gggagacuuucccauucuguagcagaauuugguguugccuguggucuuggucccgcggagaagcuuaccauggugccccaggcccuccuguucgucccgcugcugguguucccccucugcuucggcaaguuccccaucuacaccauccccgacaagcuggggccguggagccccaucgacauccaccaccuguccugccccaacaaccucguggucgaggacgagggcugcaccaaccugagcggguucuccuacauggagcugaaggugggcuacaucagcgccaucaagaugaacggguucacgugcaccggcguggucaccgaggcggagaccuacacgaacuucgugggcuacgugaccaccaccuucaagcggaagcacuuccgccccacgccggacgccugccgggccgccuacaacuggaagauggccggggacccccgcuacgaggagucccuccacaaccccuaccccgacuaccacuggcugcggaccgucaagaccaccaaggagagccuggugaucaucuccccgagcguggcggaccucgaccccuacgaccgcucccugcacagccgggucuuccccggcgggaacugcuccggcguggccgugagcuccacguacugcagcaccaaccacgacuacaccaucuggaugcccgagaacccgcgccuggggauguccugcgacaucuucaccaacagccggggcaagcgcgccuccaagggcagcgagacgugcggguucgucgacgagcggggccucuacaagucccugaagggggccugcaagcugaagcucugcggcgugcugggccugcgccucauggacgggaccuggguggcgaugcagaccagcaacgagaccaaguggugcccccccggccagcuggucaaccugcacgacuuccggagcgacgagaucgagcaccucgugguggaggagcuggucaagaagcgcgaggagugccuggacgcccucgaguccaucaugacgaccaagagcguguccuuccggcgccugagccaccuccggaagcuggugcccggguucggcaaggccuacaccaucuucaacaagacccugauggaggccgacgcccacuacaaguccguccgcacguggaacgagaucaucccgagcaaggggugccugcgggugggcggccgcugccacccccacgucaacgggguguucuucaacggcaucauccucgggcccgacggcaacgugcugauccccgagaugcaguccagccugcuccagcagcacauggagcugcuggucuccagcgugaucccgcucaugcacccccuggcggaccccuccaccguguucaagaacggggacgaggccgaggacuucgucgaggugcaccuccccgacgugcacgagcggaucagcggcgucgaccugggccugccgaacugggggaaguacgugcugcucuccgccggcgcccugaccgcccugaugcugaucaucuuccucaugaccugcuggcgccgggugaaccggagcgagcccacgcagcacaaccugcgcgggaccggccgggaggucuccgugaccccgcagagcgggaagaucaucuccagcugggaguccuacaagagcggcggcgagaccgggcugugaggacuagucccuguucccagagcccacuuuuuuuucuuuuuuugaaauaaaauagccugucuuucagaucuaaaaaaaaaaaaaaaaaaaaaaaaaaaaaaaaaaaaaaaaaaaaaaaaaaaaaaaaaaaaaaaagaauu

SEQ ID NO: 147 - RNA, 850 nt, Artificial Sequence
  mRNA product Mp68_(2010107E04Rik)_HsEPO(GC)_PSMB3_A64-C30-histoneSL
gggagacuuucccauucuguagcagaauuugguguugccuguggucuuggucccgcggagaagcuuaccaugggcgugcacgagugccccgccuggcuguggcuccugcugagccuccugucccugccgcucgggcugcccguccugggcgcccccccgcggcucaucugcgacagccgcgugcuggagcgguaccugcucgaggcgaaggaggccgagaacaucaccaccgggugcgccgagcacugcucccugaacgagaacaucacggugccggacaccaaggucaacuucuacgccuggaagcgcauggaggugggccagcaggccguggaggucuggcaggggcuggcgcuccugagcgaggccgugcugcggggccaggcccuccuggugaacuccagccagcccugggagccccugcagcuccacgucgacaaggccguguccggccugcgcagccugaccacccuccugcgggcgcugggggcccagaaggaggccaucucccccccggacgccgccagcgcggccccgcuccgcacgaucaccgccgacaccuuccggaagcuguuccgcguguacuccaacuuccugcggggcaagcucaagcuguacaccggggaggccugccgcacgggcgaccggugaggacuagucccuguucccagagcccacuuuuuuuucuuuuuuugaaauaaaauagccugucuuucagaucuaaaaaaaaaaaaaaaaaaaaaaaaaaaaaaaaaaaaaaaaaaaaaaaaaaaaaaaaaaaaaaaaugcaucccccccccccccccccccccccccccccccaaaggcucuuuucagagccaccagaauu

SEQ ID NO: 148 - RNA, 791 nt, Artificial Sequence
  mRNA product Mp68_(2010107E04Rik)_HsEPO(GC)_PSMB3_A64
gggagacuuucccauucuguagcagaauuugguguugccuguggucuuggucccgcggagaagcuuaccaugggcgugcacgagugccccgccuggcuguggcuccugcugagccuccugucccugccgcucgggcugcccguccugggcgcccccccgcggcucaucugcgacagccgcgugcuggagcgguaccugcucgaggcgaaggaggccgagaacaucaccaccgggugcgccgagcacugcucccugaacgagaacaucacggugccggacaccaaggucaacuucuacgccuggaagcgcauggaggugggccagcaggccguggaggucuggcaggggcuggcgcuccugagcgaggccgugcugcggggccaggcccuccuggugaacuccagccagcccugggagccccugcagcuccacgucgacaaggccguguccggccugcgcagccugaccacccuccugcgggcgcugggggcccagaaggaggccaucucccccccggacgccgccagcgcggccccgcuccgcacgaucaccgccgacaccuuccggaagcuguuccgcguguacuccaacuuccugcggggcaagcucaagcuguacaccggggaggccugccgcacgggcgaccggugaggacuagucccuguucccagagcccacuuuuuuuucuuuuuuugaaauaaaauagccugucuuucagaucuaaaaaaaaaaaaaaaaaaaaaaaaaaaaaaaaaaaaaaaaaaaaaaaaaaaaaaaaaaaaaaaagaauu

SEQ ID NO: 149 - RNA, 1921 nt, Artificial Sequence
  mRNA product Mp68_(2010107E04Rik)_PpLuc(GC)_PSMB3_A64-C30-histoneSL
gggagacuuucccauucuguagcagaauuugguguugccuguggucuuggucccgcggagaagcuuaccauggaggacgccaagaacaucaagaagggcccggcgcccuucuacccgcuggaggacgggaccgccggcgagcagcuccacaaggccaugaagcgguacgcccuggugccgggcacgaucgccuucaccgacgcccacaucgaggucgacaucaccuacgcggaguacuucgagaugagcgugcgccuggccgaggccaugaagcgguacggccugaacaccaaccaccggaucguggugugcucggagaacagccugcaguucuucaugccggugcugggcgcccucuucaucggcguggccgucgccccggcgaacgacaucuacaacgagcgggagcugcugaacagcauggggaucagccagccgaccgugguguucgugagcaagaagggccugcagaagauccugaacgugcagaagaagcugcccaucauccagaagaucaucaucauggacagcaagaccgacuaccagggcuuccagucgauguacacguucgugaccagccaccucccgccgggcuucaacgaguacgacuucgucccggagagcuucgaccgggacaagaccaucgcccugaucaugaacagcagcggcagcaccggccugccgaaggggguggcccugccgcaccggaccgccugcgugcgcuucucgcacgcccgggaccccaucuucggcaaccagaucaucccggacaccgccauccugagcguggugccguuccaccacggcuucggcauguucacgacccugggcuaccucaucugcggcuuccgggugguccugauguaccgguucgaggaggagcuguuccugcggagccugcaggacuacaagauccagagcgcgcugcucgugccgacccuguucagcuucuucgccaagagcacccugaucgacaaguacgaccugucgaaccugcacgagaucgccagcgggggcgccccgcugagcaaggaggugggcgaggccguggccaagcgguuccaccucccgggcauccgccagggcuacggccugaccgagaccacgagcgcgauccugaucacccccgagggggacgacaagccgggcgccgugggcaagguggucccguucuucgaggccaaggugguggaccuggacaccggcaagacccugggcgugaaccagcggggcgagcugugcgugcgggggccgaugaucaugagcggcuacgugaacaacccggaggccaccaacgcccucaucgacaaggacggcuggcugcacagcggcgacaucgccuacugggacgaggacgagcacuucuucaucgucgaccggcugaagucgcugaucaaguacaagggcuaccagguggcgccggccgagcuggagagcauccugcuccagcaccccaacaucuucgacgccggcguggccgggcugccggacgacgacgccggcgagcugccggccgcggugguggugcuggagcacggcaagaccaugacggagaaggagaucgucgacuacguggccagccaggugaccaccgccaagaagcugcggggcggcgugguguucguggacgaggucccgaagggccugaccgggaagcucgacgcccggaagauccgcgagauccugaucaaggccaagaagggcggcaagaucgccgugugaggacuagucccuguucccagagcccacuuuuuuuucuuuuuuugaaauaaaauagccugucuuucagaucuaaaaaaaaaaaaaaaaaaaaaaaaaaaaaaaaaaaaaaaaaaaaaaaaaaaaaaaaaaaaaaaaugcaucccccccccccccccccccccccccccccccaaaggcucuuuucagagccaccagaauu

SEQ ID NO: 150 - RNA, 1862 nt, Artificial Sequence
  mRNA product Mp68_(2010107E04Rik)_PpLuc(GC)_PSMB3_A64
gggagacuuucccauucuguagcagaauuugguguugccuguggucuuggucccgcggagaagcuuaccauggaggacgccaagaacaucaagaagggcccggcgcccuucuacccgcuggaggacgggaccgccggcgagcagcuccacaaggccaugaagcgguacgcccuggugccgggcacgaucgccuucaccgacgcccacaucgaggucgacaucaccuacgcggaguacuucgagaugagcgugcgccuggccgaggccaugaagcgguacggccugaacaccaaccaccggaucguggugugcucggagaacagccugcaguucuucaugccggugcugggcgcccucuucaucggcguggccgucgccccggcgaacgacaucuacaacgagcgggagcugcugaacagcauggggaucagccagccgaccgugguguucgugagcaagaagggccugcagaagauccugaacgugcagaagaagcugcccaucauccagaagaucaucaucauggacagcaagaccgacuaccagggcuuccagucgauguacacguucgugaccagccaccucccgccgggcuucaacgaguacgacuucgucccggagagcuucgaccgggacaagaccaucgcccugaucaugaacagcagcggcagcaccggccugccgaaggggguggcccugccgcaccggaccgccugcgugcgcuucucgcacgcccgggaccccaucuucggcaaccagaucaucccggacaccgccauccugagcguggugccguuccaccacggcuucggcauguucacgacccugggcuaccucaucugcggcuuccgggugguccugauguaccgguucgaggaggagcuguuccugcggagccugcaggacuacaagauccagagcgcgcugcucgugccgacccuguucagcuucuucgccaagagcacccugaucgacaaguacgaccugucgaaccugcacgagaucgccagcgggggcgccccgcugagcaaggaggugggcgaggccguggccaagcgguuccaccucccgggcauccgccagggcuacggccugaccgagaccacgagcgcgauccugaucacccccgagggggacgacaagccgggcgccgugggcaagguggucccguucuucgaggccaaggugguggaccuggacaccggcaagacccugggcgugaaccagcggggcgagcugugcgugcgggggccgaugaucaugagcggcuacgugaacaacccggaggccaccaacgcccucaucgacaaggacggcuggcugcacagcggcgacaucgccuacugggacgaggacgagcacuucuucaucgucgaccggcugaagucgcugaucaaguacaagggcuaccagguggcgccggccgagcuggagagcauccugcuccagcaccccaacaucuucgacgccggcguggccgggcugccggacgacgacgccggcgagcugccggccgcggugguggugcuggagcacggcaagaccaugacggagaaggagaucgucgacuacguggccagccaggugaccaccgccaagaagcugcggggcggcgugguguucguggacgaggucccgaagggccugaccgggaagcucgacgcccggaagauccgcgagauccugaucaaggccaagaagggcggcaagaucgccgugugaggacuagucccuguucccagagcccacuuuuuuuucuuuuuuugaaauaaaauagccugucuuucagaucuaaaaaaaaaaaaaaaaaaaaaaaaaaaaaaaaaaaaaaaaaaaaaaaaaaaaaaaaaaaaaaaagaauu

SEQ ID NO: 151 - RNA, 1930 nt, Artificial Sequence
  mRNA product Mp68_protein of interest example 5_PSMB3_A64-C30-histoneSL
  misc_feature (70)..(1731): n is a, c, g, or u
gggagacuuucccauucuguagcagaauuugguguugccuguggucuuggucccgcggagaagcuuaccnnnnnnnnnnnnnnnnnnnnnnnnnnnnnnnnnnnnnnnnnnnnnnnnnnnnnnnnnnnnnnnnnnnnnnnnnnnnnnnnnnnnnnnnnnnnnnnnnnnnnnnnnnnnnnnnnnnnnnnnnnnnnnnnnnnnnnnnnnnnnnnnnnnnnnnnnnnnnnnnnnnnnnnnnnnnnnnnnnnnnnnnnnnnnnnnnnnnnnnnnnnnnnnnnnnnnnnnnnnnnnnnnnnnnnnnnnnnnnnnnnnnnnnnnnnnnnnnnnnnnnnnnnnnnnnnnnnnnnnnnnnnnnnnnnnnnnnnnnnnnnnnnnnnnnnnnnnnnnnnnnnnnnnnnnnnnnnnnnnnnnnnnnnnnnnnnnnnnnnnnnnnnnnnnnnnnnnnnnnnnnnnnnnnnnnnnnnnnnnnnnnnnnnnnnnnnnnnnnnnnnnnnnnnnnnnnnnnnnnnnnnnnnnnnnnnnnnnnnnnnnnnnnnnnnnnnnnnnnnnnnnnnnnnnnnnnnnnnnnnnnnnnnnnnnnnnnnnnnnnnnnnnnnnnnnnnnnnnnnnnnnnnnnnnnnnnnnnnnnnnnnnnnnnnnnnnnnnnnnnnnnnnnnnnnnnnnnnnnnnnnnnnnnnnnnnnnnnnnnnnnnnnnnnnnnnnnnnnnnnnnnnnnnnnnnnnnnnnnnnnnnnnnnnnnnnnnnnnnnnnnnnnnnnnnnnnnnnnnnnnnnnnnnnnnnnnnnnnnnnnnnnnnnnnnnnnnnnnnnnnnnnnnnnnnnnnnnnnnnnnnnnnnnnnnnnnnnnnnnnnnnnnnnnnnnnnnnnnnnnnnnnnnnnnnnnnnnnnnnnnnnnnnnnnnnnnnnnnnnnnnnnnnnnnnnnnnnnnnnnnnnnnnnnnnnnnnnnnnnnnnnnnnnnnnnnnnnnnnnnnnnnnnnnnnnnnnnnnnnnnnnnnnnnnnnnnnnnnnnnnnnnnnnnnnnnnnnnnnnnnnnnnnnnnnnnnnnnnnnnnnnnnnnnnnnnnnnnnnnnnnnnnnnnnnnnnnnnnnnnnnnnnnnnnnnnnnnnnnnnnnnnnnnnnnnnnnnnnnnnnnnnnnnnnnnnnnnnnnnnnnnnnnnnnnnnnnnnnnnnnnnnnnnnnnnnnnnnnnnnnnnnnnnnnnnnnnnnnnnnnnnnnnnnnnnnnnnnnnnnnnnnnnnnnnnnnnnnnnnnnnnnnnnnnnnnnnnnnnnnnnnnnnnnnnnnnnnnnnnnnnnnnnnnnnnnnnnnnnnnnnnnnnnnnnnnnnnnnnnnnnnnnnnnnnnnnnnnnnnnnnnnnnnnnnnnnnnnnnnnnnnnnnnnnnnnnnnnnnnnnnnnnnnnnnnnnnnnnnnnnnnnnnnnnnnnnnnnnnnnnnnnnnnnnnnnnnnnnnnnnnnnnnnnnnnnnnnnnnnnnnnnnnnnnnnnnnnnnnnnnnnnnnnnnnnnnnnnnnnnnnnnnnnnnnnnnnnnnnnnnnnnnnnnnnnnnnnnnnnnnnnnnnnnnnnnnnnnnnnnnnnnnnnnnnnnnnnnnnnnnnnnnnnnnnnnnnnnnnnnnnnnnnnnnnnnnnnnnnnnnnnnnnnnnnnnnnnnnnnnnnnnnnnnnnnnnnnnnnnnnnnnnnnnnnnnnnnnnnnnnnnnnnnnnnnnnnnnnnnnnnnnnnnnnnnnnnnnnnnnnnggacuagucccuguucccagagcccacuuuuuuuucuuuuuuugaaauaaaauagccugucuuucagaucuaaaaaaaaaaaaaaaaaaaaaaaaaaaaaaaaaaaaaaaaaaaaaaaaaaaaaaaaaaaaaaaaugcaucccccccccccccccccccccccccccccccaaaggcucuuuucagagccaccagaauu

SEQ ID NO: 152 - RNA, 1907 nt, Artificial Sequence
  mRNA product Mp68_(2010107E04Rik)_RAV-G(GC)_CASP1_A64-C30-histoneSL
gggagacuuucccauucuguagcagaauuugguguugccuguggucuuggucccgcggagaagcuuaccauggugccccaggcccuccuguucgucccgcugcugguguucccccucugcuucggcaaguuccccaucuacaccauccccgacaagcuggggccguggagccccaucgacauccaccaccuguccugccccaacaaccucguggucgaggacgagggcugcaccaaccugagcggguucuccuacauggagcugaaggugggcuacaucagcgccaucaagaugaacggguucacgugcaccggcguggucaccgaggcggagaccuacacgaacuucgugggcuacgugaccaccaccuucaagcggaagcacuuccgccccacgccggacgccugccgggccgccuacaacuggaagauggccggggacccccgcuacgaggagucccuccacaaccccuaccccgacuaccacuggcugcggaccgucaagaccaccaaggagagccuggugaucaucuccccgagcguggcggaccucgaccccuacgaccgcucccugcacagccgggucuuccccggcgggaacugcuccggcguggccgugagcuccacguacugcagcaccaaccacgacuacaccaucuggaugcccgagaacccgcgccuggggauguccugcgacaucuucaccaacagccggggcaagcgcgccuccaagggcagcgagacgugcggguucgucgacgagcggggccucuacaagucccugaagggggccugcaagcugaagcucugcggcgugcugggccugcgccucauggacgggaccuggguggcgaugcagaccagcaacgagaccaaguggugcccccccggccagcuggucaaccugcacgacuuccggagcgacgagaucgagcaccucgugguggaggagcuggucaagaagcgcgaggagugccuggacgcccucgaguccaucaugacgaccaagagcguguccuuccggcgccugagccaccuccggaagcuggugcccggguucggcaaggccuacaccaucuucaacaagacccugauggaggccgacgcccacuacaaguccguccgcacguggaacgagaucaucccgagcaaggggugccugcgggugggcggccgcugccacccccacgucaacgggguguucuucaacggcaucauccucgggcccgacggcaacgugcugauccccgagaugcaguccagccugcuccagcagcacauggagcugcuggucuccagcgugaucccgcucaugcacccccuggcggaccccuccaccguguucaagaacggggacgaggccgaggacuucgucgaggugcaccuccccgacgugcacgagcggaucagcggcgucgaccugggccugccgaacugggggaaguacgugcugcucuccgccggcgcccugaccgcccugaugcugaucaucuuccucaugaccugcuggcgccgggugaaccggagcgagcccacgcagcacaaccugcgcgggaccggccgggaggucuccgugaccccgcagagcgggaagaucaucuccagcugggaguccuacaagagcggcggcgagaccgggcugugaggacuaguaauaaggaaacuguaugaaugucugugggcaggaagugaagagauccuucuguaaagguuuuuggaauuaugucugcugaauaauaaacuuuuuugaaauaauaaaucugguagaaaaaugagaucuaaaaaaaaaaaaaaaaaaaaaaaaaaaaaaaaaaaaaaaaaaaaaaaaaaaaaaaaaaaaaaaaugcaucccccccccccccccccccccccccccccccaaaggcucuuuucagagccaccagaauu

SEQ ID NO: 153 - RNA, 1848 nt, Artificial Sequence
  mRNA product Mp68_(2010107E04Rik)_RAV-G(GC)_CASP1_A64
gggagacuuucccauucuguagcagaauuugguguugccuguggucuuggucccgcggagaagcuuaccauggugccccaggcccuccuguucgucccgcugcugguguucccccucugcuucggcaaguuccccaucuacaccauccccgacaagcuggggccguggagccccaucgacauccaccaccuguccugccccaacaaccucguggucgaggacgagggcugcaccaaccugagcggguucuccuacauggagcugaaggugggcuacaucagcgccaucaagaugaacggguucacgugcaccggcguggucaccgaggcggagaccuacacgaacuucgugggcuacgugaccaccaccuucaagcggaagcacuuccgccccacgccggacgccugccgggccgccuacaacuggaagauggccggggacccccgcuacgaggagucccuccacaaccccuaccccgacuaccacuggcugcggaccgucaagaccaccaaggagagccuggugaucaucuccccgagcguggcggaccucgaccccuacgaccgcucccugcacagccgggucuuccccggcgggaacugcuccggcguggccgugagcuccacguacugcagcaccaaccacgacuacaccaucuggaugcccgagaacccgcgccuggggauguccugcgacaucuucaccaacagccggggcaagcgcgccuccaagggcagcgagacgugcggguucgucgacgagcggggccucuacaagucccugaagggggccugcaagcugaagcucugcggcgugcugggccugcgccucauggacgggaccuggguggcgaugcagaccagcaacgagaccaaguggugcccccccggccagcuggucaaccugcacgacuuccggagcgacgagaucgagcaccucgugguggaggagcuggucaagaagcgcgaggagugccuggacgcccucgaguccaucaugacgaccaagagcguguccuuccggcgccugagccaccuccggaagcuggugcccggguucggcaaggccuacaccaucuucaacaagacccugauggaggccgacgcccacuacaaguccguccgcacguggaacgagaucaucccgagcaaggggugccugcgggugggcggccgcugccacccccacgucaacgggguguucuucaacggcaucauccucgggcccgacggcaacgugcugauccccgagaugcaguccagccugcuccagcagcacauggagcugcuggucuccagcgugaucccgcucaugcacccccuggcggaccccuccaccguguucaagaacggggacgaggccgaggacuucgucgaggugcaccuccccgacgugcacgagcggaucagcggcgucgaccugggccugccgaacugggggaaguacgugcugcucuccgccggcgcccugaccgcccugaugcugaucaucuuccucaugaccugcuggcgccgggugaaccggagcgagcccacgcagcacaaccugcgcgggaccggccgggaggucuccgugaccccgcagagcgggaagaucaucuccagcugggaguccuacaagagcggcggcgagaccgggcugugaggacuaguaauaaggaaacuguaugaaugucugugggcaggaagugaagagauccuucuguaaagguuuuuggaauuaugucugcugaauaauaaacuuuuuugaaauaauaaaucugguagaaaaaugagaucuaaaaaaaaaaaaaaaaaaaaaaaaaaaaaaaaaaaaaaaaaaaaaaaaaaaaaaaaaaaaaaaagaauu

SEQ ID NO: 154 - RNA, 914 nt, Artificial Sequence
  mRNA product Mp68_(2010107E04Rik)_HsEPO(GC)_CASP1_A64-C30-histoneSL
gggagacuuucccauucuguagcagaauuugguguugccuguggucuuggucccgcggagaagcuuaccaugggcgugcacgagugccccgccuggcuguggcuccugcugagccuccugucccugccgcucgggcugcccguccugggcgcccccccgcggcucaucugcgacagccgcgugcuggagcgguaccugcucgaggcgaaggaggccgagaacaucaccaccgggugcgccgagcacugcucccugaacgagaacaucacggugccggacaccaaggucaacuucuacgccuggaagcgcauggaggugggccagcaggccguggaggucuggcaggggcuggcgcuccugagcgaggccgugcugcggggccaggcccuccuggugaacuccagccagcccugggagccccugcagcuccacgucgacaaggccguguccggccugcgcagccugaccacccuccugcgggcgcugggggcccagaaggaggccaucucccccccggacgccgccagcgcggccccgcuccgcacgaucaccgccgacaccuuccggaagcuguuccgcguguacuccaacuuccugcggggcaagcucaagcuguacaccggggaggccugccgcacgggcgaccggugaggacuaguaauaaggaaacuguaugaaugucugugggcaggaagugaagagauccuucuguaaagguuuuuggaauuaugucugcugaauaauaaacuuuuuugaaauaauaaaucugguagaaaaaugagaucuaaaaaaaaaaaaaaaaaaaaaaaaaaaaaaaaaaaaaaaaaaaaaaaaaaaaaaaaaaaaaaaaugcaucccccccccccccccccccccccccccccccaaaggcucuuuucagagccaccagaauu

SEQ ID NO: 155 - RNA, 855 nt, Artificial Sequence
  mRNA product Mp68_(2010107E04Rik)_HsEPO(GC)_CASP1_A64
gggagacuuucccauucuguagcagaauuugguguugccuguggucuuggucccgcggagaagcuuaccaugggcgugcacgagugccccgccuggcuguggcuccugcugagccuccugucccugccgcucgggcugcccguccugggcgcccccccgcggcucaucugcgacagccgcgugcuggagcgguaccugcucgaggcgaaggaggccgagaacaucaccaccgggugcgccgagcacugcucccugaacgagaacaucacggugccggacaccaaggucaacuucuacgccuggaagcgcauggaggugggccagcaggccguggaggucuggcaggggcuggcgcuccugagcgaggccgugcugcggggccaggcccuccuggugaacuccagccagcccugggagccccugcagcuccacgucgacaaggccguguccggccugcgcagccugaccacccuccugcgggcgcugggggcccagaaggaggccaucucccccccggacgccgccagcgcggccccgcuccgcacgaucaccgccgacaccuuccggaagcuguuccgcguguacuccaacuuccugcggggcaagcucaagcuguacaccggggaggccugccgcacgggcgaccggugaggacuaguaauaaggaaacuguaugaaugucugugggcaggaagugaagagauccuucuguaaagguuuuuggaauuaugucugcugaauaauaaacuuuuuugaaauaauaaaucugguagaaaaaugagaucuaaaaaaaaaaaaaaaaaaaaaaaaaaaaaaaaaaaaaaaaaaaaaaaaaaaaaaaaaaaaaaaagaauu

SEQ ID NO: 156 - RNA, 1985 nt, Artificial Sequence
  mRNA product Mp68_(2010107E04Rik)_PpLuc(GC)_CASP1_A64-C30-histoneSL
gggagacuuucccauucuguagcagaauuugguguugccuguggucuuggucccgcggagaagcuuaccauggaggacgccaagaacaucaagaagggcccggcgcccuucuacccgcuggaggacgggaccgccggcgagcagcuccacaaggccaugaagcgguacgcccuggugccgggcacgaucgccuucaccgacgcccacaucgaggucgacaucaccuacgcggaguacuucgagaugagcgugcgccuggccgaggccaugaagcgguacggccugaacaccaaccaccggaucguggugugcucggagaacagccugcaguucuucaugccggugcugggcgcccucuucaucggcguggccgucgccccggcgaacgacaucuacaacgagcgggagcugcugaacagcauggggaucagccagccgaccgugguguucgugagcaagaagggccugcagaagauccugaacgugcagaagaagcugcccaucauccagaagaucaucaucauggacagcaagaccgacuaccagggcuuccagucgauguacacguucgugaccagccaccucccgccgggcuucaacgaguacgacuucgucccggagagcuucgaccgggacaagaccaucgcccugaucaugaacagcagcggcagcaccggccugccgaaggggguggcccugccgcaccggaccgccugcgugcgcuucucgcacgcccgggaccccaucuucggcaaccagaucaucccggacaccgccauccugagcguggugccguuccaccacggcuucggcauguucacgacccugggcuaccucaucugcggcuuccgggugguccugauguaccgguucgaggaggagcuguuccugcggagccugcaggacuacaagauccagagcgcgcugcucgugccgacccuguucagcuucuucgccaagagcacccugaucgacaaguacgaccugucgaaccugcacgagaucgccagcgggggcgccccgcugagcaaggaggugggcgaggccguggccaagcgguuccaccucccgggcauccgccagggcuacggccugaccgagaccacgagcgcgauccugaucacccccgagggggacgacaagccgggcgccgugggcaagguggucccguucuucgaggccaaggugguggaccuggacaccggcaagacccugggcgugaaccagcggggcgagcugugcgugcgggggccgaugaucaugagcggcuacgugaacaacccggaggccaccaacgcccucaucgacaaggacggcuggcugcacagcggcgacaucgccuacugggacgaggacgagcacuucuucaucgucgaccggcugaagucgcugaucaaguacaagggcuaccagguggcgccggccgagcuggagagcauccugcuccagcaccccaacaucuucgacgccggcguggccgggcugccggacgacgacgccggcgagcugccggccgcggugguggugcuggagcacggcaagaccaugacggagaaggagaucgucgacuacguggccagccaggugaccaccgccaagaagcugcggggcggcgugguguucguggacgaggucccgaagggccugaccgggaagcucgacgcccggaagauccgcgagauccugaucaaggccaagaagggcggcaagaucgccgugugaggacuaguaauaaggaaacuguaugaaugucugugggcaggaagugaagagauccuucuguaaagguuuuuggaauuaugucugcugaauaauaaacuuuuuugaaauaauaaaucugguagaaaaaugagaucuaaaaaaaaaaaaaaaaaaaaaaaaaaaaaaaaaaaaaaaaaaaaaaaaaaaaaaaaaaaaaaaaugcaucccccccccccccccccccccccccccccccaaaggcucuuuucagagccaccagaauu

SEQ ID NO: 157 - RNA, 1926 nt, Artificial Sequence
  mRNA product Mp68_(2010107E04Rik)_PpLuc(GC)_CASP1_A64
gggagacuuucccauucuguagcagaauuugguguugccuguggucuuggucccgcggagaagcuuaccauggaggacgccaagaacaucaagaagggcccggcgcccuucuacccgcuggaggacgggaccgccggcgagcagcuccacaaggccaugaagcgguacgcccuggugccgggcacgaucgccuucaccgacgcccacaucgaggucgacaucaccuacgcggaguacuucgagaugagcgugcgccuggccgaggccaugaagcgguacggccugaacaccaaccaccggaucguggugugcucggagaacagccugcaguucuucaugccggugcugggcgcccucuucaucggcguggccgucgccccggcgaacgacaucuacaacgagcgggagcugcugaacagcauggggaucagccagccgaccgugguguucgugagcaagaagggccugcagaagauccugaacgugcagaagaagcugcccaucauccagaagaucaucaucauggacagcaagaccgacuaccagggcuuccagucgauguacacguucgugaccagccaccucccgccgggcuucaacgaguacgacuucgucccggagagcuucgaccgggacaagaccaucgcccugaucaugaacagcagcggcagcaccggccugccgaaggggguggcccugccgcaccggaccgccugcgugcgcuucucgcacgcccgggaccccaucuucggcaaccagaucaucccggacaccgccauccugagcguggugccguuccaccacggcuucggcauguucacgacccugggcuaccucaucugcggcuuccgggugguccugauguaccgguucgaggaggagcuguuccugcggagccugcaggacuacaagauccagagcgcgcugcucgugccgacccuguucagcuucuucgccaagagcacccugaucgacaaguacgaccugucgaaccugcacgagaucgccagcgggggcgccccgcugagcaaggaggugggcgaggccguggccaagcgguuccaccucccgggcauccgccagggcuacggccugaccgagaccacgagcgcgauccugaucacccccgagggggacgacaagccgggcgccgugggcaagguggucccguucuucgaggccaaggugguggaccuggacaccggcaagacccugggcgugaaccagcggggcgagcugugcgugcgggggccgaugaucaugagcggcuacgugaacaacccggaggccaccaacgcccucaucgacaaggacggcuggcugcacagcggcgacaucgccuacugggacgaggacgagcacuucuucaucgucgaccggcugaagucgcugaucaaguacaagggcuaccagguggcgccggccgagcuggagagcauccugcuccagcaccccaacaucuucgacgccggcguggccgggcugccggacgacgacgccggcgagcugccggccgcggugguggugcuggagcacggcaagaccaugacggagaaggagaucgucgacuacguggccagccaggugaccaccgccaagaagcugcggggcggcgugguguucguggacgaggucccgaagggccugaccgggaagcucgacgcccggaagauccgcgagauccugaucaaggccaagaagggcggcaagaucgccgugugaggacuaguaauaaggaaacuguaugaaugucugugggcaggaagugaagagauccuucuguaaagguuuuuggaauuaugucugcugaauaauaaacuuuuuugaaauaauaaaucugguagaaaaaugagaucuaaaaaaaaaaaaaaaaaaaaaaaaaaaaaaaaaaaaaaaaaaaaaaaaaaaaaaaaaaaaaaaagaauu

SEQ ID NO: 158 - RNA, 1994 nt, Artificial Sequence
  mRNA product Mp68_protein of interest example 5_CASP1_A64-C30-histoneSL
  misc_feature (70)..(1731): n is a, c, g, or u
gggagacuuucccauucuguagcagaauuugguguugccuguggucuuggucccgcggagaagcuuaccnnnnnnnnnnnnnnnnnnnnnnnnnnnnnnnnnnnnnnnnnnnnnnnnnnnnnnnnnnnnnnnnnnnnnnnnnnnnnnnnnnnnnnnnnnnnnnnnnnnnnnnnnnnnnnnnnnnnnnnnnnnnnnnnnnnnnnnnnnnnnnnnnnnnnnnnnnnnnnnnnnnnnnnnnnnnnnnnnnnnnnnnnnnnnnnnnnnnnnnnnnnnnnnnnnnnnnnnnnnnnnnnnnnnnnnnnnnnnnnnnnnnnnnnnnnnnnnnnnnnnnnnnnnnnnnnnnnnnnnnnnnnnnnnnnnnnnnnnnnnnnnnnnnnnnnnnnnnnnnnnnnnnnnnnnnnnnnnnnnnnnnnnnnnnnnnnnnnnnnnnnnnnnnnnnnnnnnnnnnnnnnnnnnnnnnnnnnnnnnnnnnnnnnnnnnnnnnnnnnnnnnnnnnnnnnnnnnnnnnnnnnnnnnnnnnnnnnnnnnnnnnnnnnnnnnnnnnnnnnnnnnnnnnnnnnnnnnnnnnnnnnnnnnnnnnnnnnnnnnnnnnnnnnnnnnnnnnnnnnnnnnnnnnnnnnnnnnnnnnnnnnnnnnnnnnnnnnnnnnnnnnnnnnnnnnnnnnnnnnnnnnnnnnnnnnnnnnnnnnnnnnnnnnnnnnnnnnnnnnnnnnnnnnnnnnnnnnnnnnnnnnnnnnnnnnnnnnnnnnnnnnnnnnnnnnnnnnnnnnnnnnnnnnnnnnnnnnnnnnnnnnnnnnnnnnnnnnnnnnnnnnnnnnnnnnnnnnnnnnnnnnnnnnnnnnnnnnnnnnnnnnnnnnnnnnnnnnnnnnnnnnnnnnnnnnnnnnnnnnnnnnnnnnnnnnnnnnnnnnnnnnnnnnnnnnnnnnnnnnnnnnnnnnnnnnnnnnnnnnnnnnnnnnnnnnnnnnnnnnnnnnnnnnnnnnnnnnnnnnnnnnnnnnnnnnnnnnnnnnnnnnnnnnnnnnnnnnnnnnnnnnnnnnnnnnnnnnnnnnnnnnnnnnnnnnnnnnnnnnnnnnnnnnnnnnnnnnnnnnnnnnnnnnnnnnnnnnnnnnnnnnnnnnnnnnnnnnnnnnnnnnnnnnnnnnnnnnnnnnnnnnnnnnnnnnnnnnnnnnnnnnnnnnnnnnnnnnnnnnnnnnnnnnnnnnnnnnnnnnnnnnnnnnnnnnnnnnnnnnnnnnnnnnnnnnnnnnnnnnnnnnnnnnnnnnnnnnnnnnnnnnnnnnnnnnnnnnnnnnnnnnnnnnnnnnnnnnnnnnnnnnnnnnnnnnnnnnnnnnnnnnnnnnnnnnnnnnnnnnnnnnnnnnnnnnnnnnnnnnnnnnnnnnnnnnnnnnnnnnnnnnnnnnnnnnnnnnnnnnnnnnnnnnnnnnnnnnnnnnnnnnnnnnnnnnnnnnnnnnnnnnnnnnnnnnnnnnnnnnnnnnnnnnnnnnnnnnnnnnnnnnnnnnnnnnnnnnnnnnnnnnnnnnnnnnnnnnnnnnnnnnnnnnnnnnnnnnnnnnnnnnnnnnnnnnnnnnnnnnnnnnnnnnnnnnnnnnnnnnnnnnnnnnnnnnnnnnnnnnnnnnnnnnnnnnnnnnnnnnnnnnnnnnnnnnnnnnnnnnnnnnnnnnnnnnnnnnnnnnnnnnnnnnnnnnnnnnnnnnnnnnnnnnnnnnnnnnnnnnnnnnnnnnnnnnnnnnnnnnnnnggacuaguaauaaggaaacuguaugaaugucugugggcaggaagugaagagauccuucuguaaagguuuuuggaauuaugucugcugaauaauaaacuuuuuugaaauaauaaaucugguagaaaaaugagaucuaaaaaaaaaaaaaaaaaaaaaaaaaaaaaaaaaaaaaaaaaaaaaaaaaaaaaaaaaaaaaaaaugcaucccccccccccccccccccccccccccccccaaaggcucuuuucagagccaccagaauu

SEQ ID NO: 159 - RNA, 1923 nt, Artificial Sequence
  mRNA product Mp68_(2010107E04Rik)_RAV-G(GC)_COX6B1_A64-C30-histoneSL
gggagacuuucccauucuguagcagaauuugguguugccuguggucuuggucccgcggagaagcuuaccauggugccccaggcccuccuguucgucccgcugcugguguucccccucugcuucggcaaguuccccaucuacaccauccccgacaagcuggggccguggagccccaucgacauccaccaccuguccugccccaacaaccucguggucgaggacgagggcugcaccaaccugagcggguucuccuacauggagcugaaggugggcuacaucagcgccaucaagaugaacggguucacgugcaccggcguggucaccgaggcggagaccuacacgaacuucgugggcuacgugaccaccaccuucaagcggaagcacuuccgccccacgccggacgccugccgggccgccuacaacuggaagauggccggggacccccgcuacgaggagucccuccacaaccccuaccccgacuaccacuggcugcggaccgucaagaccaccaaggagagccuggugaucaucuccccgagcguggcggaccucgaccccuacgaccgcucccugcacagccgggucuuccccggcgggaacugcuccggcguggccgugagcuccacguacugcagcaccaaccacgacuacaccaucuggaugcccgagaacccgcgccuggggauguccugcgacaucuucaccaacagccggggcaagcgcgccuccaagggcagcgagacgugcggguucgucgacgagcggggccucuacaagucccugaagggggccugcaagcugaagcucugcggcgugcugggccugcgccucauggacgggaccuggguggcgaugcagaccagcaacgagaccaaguggugcccccccggccagcuggucaaccugcacgacuuccggagcgacgagaucgagcaccucgugguggaggagcuggucaagaagcgcgaggagugccuggacgcccucgaguccaucaugacgaccaagagcguguccuuccggcgccugagccaccuccggaagcuggugcccggguucggcaaggccuacaccaucuucaacaagacccugauggaggccgacgcccacuacaaguccguccgcacguggaacgagaucaucccgagcaaggggugccugcgggugggcggccgcugccacccccacgucaacgggguguucuucaacggcaucauccucgggcccgacggcaacgugcugauccccgagaugcaguccagccugcuccagcagcacauggagcugcuggucuccagcgugaucccgcucaugcacccccuggcggaccccuccaccguguucaagaacggggacgaggccgaggacuucgucgaggugcaccuccccgacgugcacgagcggaucagcggcgucgaccugggccugccgaacugggggaaguacgugcugcucuccgccggcgcccugaccgcccugaugcugaucaucuuccucaugaccugcuggcgccgggugaaccggagcgagcccacgcagcacaaccugcgcgggaccggccgggaggucuccgugaccccgcagagcgggaagaucaucuccagcugggaguccuacaagagcggcggcgagaccgggcugugaggacuaguacuggcugcaucucccuuuccucuguccuccauccuucucccaggauggugaagggggaccugguacccagugauccccaccccaggauccuaaaucaugacuuaccugcuaauaaaaacucauuggaaaagugagaagaucuaaaaaaaaaaaaaaaaaaaaaaaaaaaaaaaaaaaaaaaaaaaaaaaaaaaaaaaaaaaaaaaaugcaucccccccccccccccccccccccccccccccaaaggcucuuuucagagccaccagaauu

SEQ ID NO: 160 - RNA, 1864 nt, Artificial Sequence
  mRNA product Mp68_(2010107E04Rik)_RAV-G(GC)_COX6B1_A64
gggagacuuucccauucuguagcagaauuugguguugccuguggucuuggucccgcggagaagcuuaccauggugccccaggcccuccuguucgucccgcugcugguguucccccucugcuucggcaaguuccccaucuacaccauccccgacaagcuggggccguggagccccaucgacauccaccaccuguccugccccaacaaccucguggucgaggacgagggcugcaccaaccugagcggguucuccuacauggagcugaaggugggcuacaucagcgccaucaagaugaacggguucacgugcaccggcguggucaccgaggcggagaccuacacgaacuucgugggcuacgugaccaccaccuucaagcggaagcacuuccgccccacgccggacgccugccgggccgccuacaacuggaagauggccggggacccccgcuacgaggagucccuccacaaccccuaccccgacuaccacuggcugcggaccgucaagaccaccaaggagagccuggugaucaucuccccgagcguggcggaccucgaccccuacgaccgcucccugcacagccgggucuuccccggcgggaacugcuccggcguggccgugagcuccacguacugcagcaccaaccacgacuacaccaucuggaugcccgagaacccgcgccuggggauguccugcgacaucuucaccaacagccggggcaagcgcgccuccaagggcagcgagacgugcggguucgucgacgagcggggccucuacaagucccugaagggggccugcaagcugaagcucugcggcgugcugggccugcgccucauggacgggaccuggguggcgaugcagaccagcaacgagaccaaguggugcccccccggccagcuggucaaccugcacgacuuccggagcgacgagaucgagcaccucgugguggaggagcuggucaagaagcgcgaggagugccuggacgcccucgaguccaucaugacgaccaagagcguguccuuccggcgccugagccaccuccggaagcuggugcccggguucggcaaggccuacaccaucuucaacaagacccugauggaggccgacgcccacuacaaguccguccgcacguggaacgagaucaucccgagcaaggggugccugcgggugggcggccgcugccacccccacgucaacgggguguucuucaacggcaucauccucgggcccgacggcaacgugcugauccccgagaugcaguccagccugcuccagcagcacauggagcugcuggucuccagcgugaucccgcucaugcacccccuggcggaccccuccaccguguucaagaacggggacgaggccgaggacuucgucgaggugcaccuccccgacgugcacgagcggaucagcggcgucgaccugggccugccgaacugggggaaguacgugcugcucuccgccggcgcccugaccgcccugaugcugaucaucuuccucaugaccugcuggcgccgggugaaccggagcgagcccacgcagcacaaccugcgcgggaccggccgggaggucuccgugaccccgcagagcgggaagaucaucuccagcugggaguccuacaagagcggcggcgagaccgggcugugaggacuaguacuggcugcaucucccuuuccucuguccuccauccuucucccaggauggugaagggggaccugguacccagugauccccaccccaggauccuaaaucaugacuuaccugcuaauaaaaacucauuggaaaagugagaagaucuaaaaaaaaaaaaaaaaaaaaaaaaaaaaaaaaaaaaaaaaaaaaaaaaaaaaaaaaaaaaaaaagaauu

SEQ ID NO: 161 - RNA, 930 nt, Artificial Sequence
  mRNA product Mp68_(2010107E04Rik)_HsEPO(GC)_COX6B1_A64-C30-histoneSL
gggagacuuucccauucuguagcagaauuugguguugccuguggucuuggucccgcggagaagcuuaccaugggcgugcacgagugccccgccuggcuguggcuccugcugagccuccugucccugccgcucgggcugcccguccugggcgcccccccgcggcucaucugcgacagccgcgugcuggagcgguaccugcucgaggcgaaggaggccgagaacaucaccaccgggugcgccgagcacugcucccugaacgagaacaucacggugccggacaccaaggucaacuucuacgccuggaagcgcauggaggugggccagcaggccguggaggucuggcaggggcuggcgcuccugagcgaggccgugcugcggggccaggcccuccuggugaacuccagccagcccugggagccccugcagcuccacgucgacaaggccguguccggccugcgcagccugaccacccuccugcgggcgcugggggcccagaaggaggccaucucccccccggacgccgccagcgcggccccgcuccgcacgaucaccgccgacaccuuccggaagcuguuccgcguguacuccaacuuccugcggggcaagcucaagcuguacaccggggaggccugccgcacgggcgaccggugaggacuaguacuggcugcaucucccuuuccucuguccuccauccuucucccaggauggugaagggggaccugguacccagugauccccaccccaggauccuaaaucaugacuuaccugcuaauaaaaacucauuggaaaagugagaagaucuaaaaaaaaaaaaaaaaaaaaaaaaaaaaaaaaaaaaaaaaaaaaaaaaaaaaaaaaaaaaaaaaugcaucccccccccccccccccccccccccccccccaaaggcucuuuucagagccaccagaauu

SEQ ID NO: 162 - RNA, 871 nt, Artificial Sequence
  mRNA product Mp68_(2010107E04Rik)_HsEPO(GC)_COX6B1_A64
gggagacuuucccauucuguagcagaauuugguguugccuguggucuuggucccgcggagaagcuuaccaugggcgugcacgagugccccgccuggcuguggcuccugcugagccuccugucccugccgcucgggcugcccguccugggcgcccccccgcggcucaucugcgacagccgcgugcuggagcgguaccugcucgaggcgaaggaggccgagaacaucaccaccgggugcgccgagcacugcucccugaacgagaacaucacggugccggacaccaaggucaacuucuacgccuggaagcgcauggaggugggccagcaggccguggaggucuggcaggggcuggcgcuccugagcgaggccgugcugcggggccaggcccuccuggugaacuccagccagcccugggagccccugcagcuccacgucgacaaggccguguccggccugcgcagccugaccacccuccugcgggcgcugggggcccagaaggaggccaucucccccccggacgccgccagcgcggccccgcuccgcacgaucaccgccgacaccuuccggaagcuguuccgcguguacuccaacuuccugcggggcaagcucaagcuguacaccggggaggccugccgcacgggcgaccggugaggacuaguacuggcugcaucucccuuuccucuguccuccauccuucucccaggauggugaagggggaccugguacccagugauccccaccccaggauccuaaaucaugacuuaccugcuaauaaaaacucauuggaaaagugagaagaucuaaaaaaaaaaaaaaaaaaaaaaaaaaaaaaaaaaaaaaaaaaaaaaaaaaaaaaaaaaaaaaaagaauu

SEQ ID NO: 163 - RNA, 2001 nt, Artificial Sequence
  mRNA product Mp68_(2010107E04Rik)_PpLuc(GC)_COX6B1_A64-C30-histoneSL
gggagacuuucccauucuguagcagaauuugguguugccuguggucuuggucccgcggagaagcuuaccauggaggacgccaagaacaucaagaagggcccggcgcccuucuacccgcuggaggacgggaccgccggcgagcagcuccacaaggccaugaagcgguacgcccuggugccgggcacgaucgccuucaccgacgcccacaucgaggucgacaucaccuacgcggaguacuucgagaugagcgugcgccuggccgaggccaugaagcgguacggccugaacaccaaccaccggaucguggugugcucggagaacagccugcaguucuucaugccggugcugggcgcccucuucaucggcguggccgucgccccggcgaacgacaucuacaacgagcgggagcugcugaacagcauggggaucagccagccgaccgugguguucgugagcaagaagggccugcagaagauccugaacgugcagaagaagcugcccaucauccagaagaucaucaucauggacagcaagaccgacuaccagggcuuccagucgauguacacguucgugaccagccaccucccgccgggcuucaacgaguacgacuucgucccggagagcuucgaccgggacaagaccaucgcccugaucaugaacagcagcggcagcaccggccugccgaaggggguggcccugccgcaccggaccgccugcgugcgcuucucgcacgcccgggaccccaucuucggcaaccagaucaucccggacaccgccauccugagcguggugccguuccaccacggcuucggcauguucacgacccugggcuaccucaucugcggcuuccgggugguccugauguaccgguucgaggaggagcuguuccugcggagccugcaggacuacaagauccagagcgcgcugcucgugccgacccuguucagcuucuucgccaagagcacccugaucgacaaguacgaccugucgaaccugcacgagaucgccagcgggggcgccccgcugagcaaggaggugggcgaggccguggccaagcgguuccaccucccgggcauccgccagggcuacggccugaccgagaccacgagcgcgauccugaucacccccgagggggacgacaagccgggcgccgugggcaagguggucccguucuucgaggccaaggugguggaccuggacaccggcaagacccugggcgugaaccagcggggcgagcugugcgugcgggggccgaugaucaugagcggcuacgugaacaacccggaggccaccaacgcccucaucgacaaggacggcuggcugcacagcggcgacaucgccuacugggacgaggacgagcacuucuucaucgucgaccggcugaagucgcugaucaaguacaagggcuaccagguggcgccggccgagcuggagagcauccugcuccagcaccccaacaucuucgacgccggcguggccgggcugccggacgacgacgccggcgagcugccggccgcggugguggugcuggagcacggcaagaccaugacggagaaggagaucgucgacuacguggccagccaggugaccaccgccaagaagcugcggggcggcgugguguucguggacgaggucccgaagggccugaccgggaagcucgacgcccggaagauccgcgagauccugaucaaggccaagaagggcggcaagaucgccgugugaggacuaguacuggcugcaucucccuuuccucuguccuccauccuucucccaggauggugaagggggaccugguacccagugauccccaccccaggauccuaaaucaugacuuaccugcuaauaaaaacucauuggaaaagugagaagaucuaaaaaaaaaaaaaaaaaaaaaaaaaaaaaaaaaaaaaaaaaaaaaaaaaaaaaaaaaaaaaaaaugcaucccccccccccccccccccccccccccccccaaaggcucuuuucagagccaccagaauu

SEQ ID NO: 164 - RNA, 1942 nt, Artificial Sequence
  mRNA product Mp68_(2010107E04Rik)_PpLuc(GC)_COX6B1_A64
gggagacuuucccauucuguagcagaauuugguguugccuguggucuuggucccgcggagaagcuuaccauggaggacgccaagaacaucaagaagggcccggcgcccuucuacccgcuggaggacgggaccgccggcgagcagcuccacaaggccaugaagcgguacgcccuggugccgggcacgaucgccuucaccgacgcccacaucgaggucgacaucaccuacgcggaguacuucgagaugagcgugcgccuggccgaggccaugaagcgguacggccugaacaccaaccaccggaucguggugugcucggagaacagccugcaguucuucaugccggugcugggcgcccucuucaucggcguggccgucgccccggcgaacgacaucuacaacgagcgggagcugcugaacagcauggggaucagccagccgaccgugguguucgugagcaagaagggccugcagaagauccugaacgugcagaagaagcugcccaucauccagaagaucaucaucauggacagcaagaccgacuaccagggcuuccagucgauguacacguucgugaccagccaccucccgccgggcuucaacgaguacgacuucgucccggagagcuucgaccgggacaagaccaucgcccugaucaugaacagcagcggcagcaccggccugccgaaggggguggcccugccgcaccggaccgccugcgugcgcuucucgcacgcccgggaccccaucuucggcaaccagaucaucccggacaccgccauccugagcguggugccguuccaccacggcuucggcauguucacgacccugggcuaccucaucugcggcuuccgggugguccugauguaccgguucgaggaggagcuguuccugcggagccugcaggacuacaagauccagagcgcgcugcucgugccgacccuguucagcuucuucgccaagagcacccugaucgacaaguacgaccugucgaaccugcacgagaucgccagcgggggcgccccgcugagcaaggaggugggcgaggccguggccaagcgguuccaccucccgggcauccgccagggcuacggccugaccgagaccacgagcgcgauccugaucacccccgagggggacgacaagccgggcgccgugggcaagguggucccguucuucgaggccaaggugguggaccuggacaccggcaagacccugggcgugaaccagcggggcgagcugugcgugcgggggccgaugaucaugagcggcuacgugaacaacccggaggccaccaacgcccucaucgacaaggacggcuggcugcacagcggcgacaucgccuacugggacgaggacgagcacuucuucaucgucgaccggcugaagucgcugaucaaguacaagggcuaccagguggcgccggccgagcuggagagcauccugcuccagcaccccaacaucuucgacgccggcguggccgggcugccggacgacgacgccggcgagcugccggccgcggugguggugcuggagcacggcaagaccaugacggagaaggagaucgucgacuacguggccagccaggugaccaccgccaagaagcugcggggcggcgugguguucguggacgaggucccgaagggccugaccgggaagcucgacgcccggaagauccgcgagauccugaucaaggccaagaagggcggcaagaucgccgugugaggacuaguacuggcugcaucucccuuuccucuguccuccauccuucucccaggauggugaagggggaccugguacccagugauccccaccccaggauccuaaaucaugacuuaccugcuaauaaaaacucauuggaaaagugagaagaucuaaaaaaaaaaaaaaaaaaaaaaaaaaaaaaaaaaaaaaaaaaaaaaaaaaaaaaaaaaaaaaaagaauu

SEQ ID NO: 165 - RNA, 2010 nt, Artificial Sequence
  mRNA product Mp68_protein of interest example 5_COX6B1_A64-C30-histoneSL
  misc_feature (70)..(1731): n is a, c, g, or u
gggagacuuucccauucuguagcagaauuugguguugccuguggucuuggucccgcggagaagcuuaccnnnnnnnnnnnnnnnnnnnnnnnnnnnnnnnnnnnnnnnnnnnnnnnnnnnnnnnnnnnnnnnnnnnnnnnnnnnnnnnnnnnnnnnnnnnnnnnnnnnnnnnnnnnnnnnnnnnnnnnnnnnnnnnnnnnnnnnnnnnnnnnnnnnnnnnnnnnnnnnnnnnnnnnnnnnnnnnnnnnnnnnnnnnnnnnnnnnnnnnnnnnnnnnnnnnnnnnnnnnnnnnnnnnnnnnnnnnnnnnnnnnnnnnnnnnnnnnnnnnnnnnnnnnnnnnnnnnnnnnnnnnnnnnnnnnnnnnnnnnnnnnnnnnnnnnnnnnnnnnnnnnnnnnnnnnnnnnnnnnnnnnnnnnnnnnnnnnnnnnnnnnnnnnnnnnnnnnnnnnnnnnnnnnnnnnnnnnnnnnnnnnnnnnnnnnnnnnnnnnnnnnnnnnnnnnnnnnnnnnnnnnnnnnnnnnnnnnnnnnnnnnnnnnnnnnnnnnnnnnnnnnnnnnnnnnnnnnnnnnnnnnnnnnnnnnnnnnnnnnnnnnnnnnnnnnnnnnnnnnnnnnnnnnnnnnnnnnnnnnnnnnnnnnnnnnnnnnnnnnnnnnnnnnnnnnnnnnnnnnnnnnnnnnnnnnnnnnnnnnnnnnnnnnnnnnnnnnnnnnnnnnnnnnnnnnnnnnnnnnnnnnnnnnnnnnnnnnnnnnnnnnnnnnnnnnnnnnnnnnnnnnnnnnnnnnnnnnnnnnnnnnnnnnnnnnnnnnnnnnnnnnnnnnnnnnnnnnnnnnnnnnnnnnnnnnnnnnnnnnnnnnnnnnnnnnnnnnnnnnnnnnnnnnnnnnnnnnnnnnnnnnnnnnnnnnnnnnnnnnnnnnnnnnnnnnnnnnnnnnnnnnnnnnnnnnnnnnnnnnnnnnnnnnnnnnnnnnnnnnnnnnnnnnnnnnnnnnnnnnnnnnnnnnnnnnnnnnnnnnnnnnnnnnnnnnnnnnnnnnnnnnnnnnnnnnnnnnnnnnnnnnnnnnnnnnnnnnnnnnnnnnnnnnnnnnnnnnnnnnnnnnnnnnnnnnnnnnnnnnnnnnnnnnnnnnnnnnnnnnnnnnnnnnnnnnnnnnnnnnnnnnnnnnnnnnnnnnnnnnnnnnnnnnnnnnnnnnnnnnnnnnnnnnnnnnnnnnnnnnnnnnnnnnnnnnnnnnnnnnnnnnnnnnnnnnnnnnnnnnnnnnnnnnnnnnnnnnnnnnnnnnnnnnnnnnnnnnnnnnnnnnnnnnnnnnnnnnnnnnnnnnnnnnnnnnnnnnnnnnnnnnnnnnnnnnnnnnnnnnnnnnnnnnnnnnnnnnnnnnnnnnnnnnnnnnnnnnnnnnnnnnnnnnnnnnnnnnnnnnnnnnnnnnnnnnnnnnnnnnnnnnnnnnnnnnnnnnnnnnnnnnnnnnnnnnnnnnnnnnnnnnnnnnnnnnnnnnnnnnnnnnnnnnnnnnnnnnnnnnnnnnnnnnnnnnnnnnnnnnnnnnnnnnnnnnnnnnnnnnnnnnnnnnnnnnnnnnnnnnnnnnnnnnnnnnnnnnnnnnnnnnnnnnnnnnnnnnnnnnnnnnnnnnnnnnnnnnnnnnnnnnnnnnnnnnnnnnnnnnnnnnnnnnnnnnnnnnnnnnnnnnnnnnnnnnnnnnnnnnnnnnnnnnnnnnnnnnnnnnnnnnnnnnnnnnnnnnnnnnnnnggacuaguacuggcugcaucucccuuuccucuguccuccauccuucucccaggauggugaagggggaccugguacccagugauccccaccccaggauccuaaaucaugacuuaccugcuaauaaaaacucauuggaaaagugagaagaucuaaaaaaaaaaaaaaaaaaaaaaaaaaaaaaaaaaaaaaaaaaaaaaaaaaaaaaaaaaaaaaaaugcaucccccccccccccccccccccccccccccccaaaggcucuuuucagagccaccagaauu

SEQ ID NO: 166 - RNA, 2139 nt, Artificial Sequence
  mRNA product Mp68_(2010107E04Rik)_RAV-G(GC)_Gnas_A64-C30-histoneSL
gggagacuuucccauucuguagcagaauuugguguugccuguggucuuggucccgcggagaagcuuaccauggugccccaggcccuccuguucgucccgcugcugguguucccccucugcuucggcaaguuccccaucuacaccauccccgacaagcuggggccguggagccccaucgacauccaccaccuguccugccccaacaaccucguggucgaggacgagggcugcaccaaccugagcggguucuccuacauggagcugaaggugggcuacaucagcgccaucaagaugaacggguucacgugcaccggcguggucaccgaggcggagaccuacacgaacuucgugggcuacgugaccaccaccuucaagcggaagcacuuccgccccacgccggacgccugccgggccgccuacaacuggaagauggccggggacccccgcuacgaggagucccuccacaaccccuaccccgacuaccacuggcugcggaccgucaagaccaccaaggagagccuggugaucaucuccccgagcguggcggaccucgaccccuacgaccgcucccugcacagccgggucuuccccggcgggaacugcuccggcguggccgugagcuccacguacugcagcaccaaccacgacuacaccaucuggaugcccgagaacccgcgccuggggauguccugcgacaucuucaccaacagccggggcaagcgcgccuccaagggcagcgagacgugcggguucgucgacgagcggggccucuacaagucccugaagggggccugcaagcugaagcucugcggcgugcugggccugcgccucauggacgggaccuggguggcgaugcagaccagcaacgagaccaaguggugcccccccggccagcuggucaaccugcacgacuuccggagcgacgagaucgagcaccucgugguggaggagcuggucaagaagcgcgaggagugccuggacgcccucgaguccaucaugacgaccaagagcguguccuuccggcgccugagccaccuccggaagcuggugcccggguucggcaaggccuacaccaucuucaacaagacccugauggaggccgacgcccacuacaaguccguccgcacguggaacgagaucaucccgagcaaggggugccugcgggugggcggccgcugccacccccacgucaacgggguguucuucaacggcaucauccucgggcccgacggcaacgugcugauccccgagaugcaguccagccugcuccagcagcacauggagcugcuggucuccagcgugaucccgcucaugcacccccuggcggaccccuccaccguguucaagaacggggacgaggccgaggacuucgucgaggugcaccuccccgacgugcacgagcggaucagcggcgucgaccugggccugccgaacugggggaaguacgugcugcucuccgccggcgcccugaccgcccugaugcugaucaucuuccucaugaccugcuggcgccgggugaaccggagcgagcccacgcagcacaaccugcgcgggaccggccgggaggucuccgugaccccgcagagcgggaagaucaucuccagcugggaguccuacaagagcggcggcgagaccgggcugugaggacuagugaagggaacacccaaauuuaauucagccuuaagcacaauuaauuaagagugaaacguaauuguacaagcaguuggucacccaccauagggcaugaucaacaccgcaaccuuuccuuuuucccccagugauucugaaaaaccccucuucccuucagcuugcuuagauguuccaaauuuaguaagcuuaaggcggccuacagaagaaaaagaaaaaaaaggccacaaaaguucccucucacuuucaguaaauaaaauaaaagcagcaacagaaauaaagaaauaaaugaaauucaaaaugaaauaaauauuguguugugcagcauuaaaaaaucaauaaaaauuaaaaaugagcaagaucuaaaaaaaaaaaaaaaaaaaaaaaaaaaaaaaaaaaaaaaaaaaaaaaaaaaaaaaaaaaaaaaaugcaucccccccccccccccccccccccccccccccaaaggcucuuuucagagccaccagaauu

SEQ ID NO: 167 - RNA, 2080 nt, Artificial Sequence
  mRNA product Mp68_(2010107E04Rik)_RAV-G(GC)_Gnas_A64
gggagacuuucccauucuguagcagaauuugguguugccuguggucuuggucccgcggagaagcuuaccauggugccccaggcccuccuguucgucccgcugcugguguucccccucugcuucggcaaguuccccaucuacaccauccccgacaagcuggggccguggagccccaucgacauccaccaccuguccugccccaacaaccucguggucgaggacgagggcugcaccaaccugagcggguucuccuacauggagcugaaggugggcuacaucagcgccaucaagaugaacggguucacgugcaccggcguggucaccgaggcggagaccuacacgaacuucgugggcuacgugaccaccaccuucaagcggaagcacuuccgccccacgccggacgccugccgggccgccuacaacuggaagauggccggggacccccgcuacgaggagucccuccacaaccccuaccccgacuaccacuggcugcggaccgucaagaccaccaaggagagccuggugaucaucuccccgagcguggcggaccucgaccccuacgaccgcucccugcacagccgggucuuccccggcgggaacugcuccggcguggccgugagcuccacguacugcagcaccaaccacgacuacaccaucuggaugcccgagaacccgcgccuggggauguccugcgacaucuucaccaacagccggggcaagcgcgccuccaagggcagcgagacgugcggguucgucgacgagcggggccucuacaagucccugaagggggccugcaagcugaagcucugcggcgugcugggccugcgccucauggacgggaccuggguggcgaugcagaccagcaacgagaccaaguggugcccccccggccagcuggucaaccugcacgacuuccggagcgacgagaucgagcaccucgugguggaggagcuggucaagaagcgcgaggagugccuggacgcccucgaguccaucaugacgaccaagagcguguccuuccggcgccugagccaccuccggaagcuggugcccggguucggcaaggccuacaccaucuucaacaagacccugauggaggccgacgcccacuacaaguccguccgcacguggaacgagaucaucccgagcaaggggugccugcgggugggcggccgcugccacccccacgucaacgggguguucuucaacggcaucauccucgggcccgacggcaacgugcugauccccgagaugcaguccagccugcuccagcagcacauggagcugcuggucuccagcgugaucccgcucaugcacccccuggcggaccccuccaccguguucaagaacggggacgaggccgaggacuucgucgaggugcaccuccccgacgugcacgagcggaucagcggcgucgaccugggccugccgaacugggggaaguacgugcugcucuccgccggcgcccugaccgcccugaugcugaucaucuuccucaugaccugcuggcgccgggugaaccggagcgagcccacgcagcacaaccugcgcgggaccggccgggaggucuccgugaccccgcagagcgggaagaucaucuccagcugggaguccuacaagagcggcggcgagaccgggcugugaggacuagugaagggaacacccaaauuuaauucagccuuaagcacaauuaauuaagagugaaacguaauuguacaagcaguuggucacccaccauagggcaugaucaacaccgcaaccuuuccuuuuucccccagugauucugaaaaaccccucuucccuucagcuugcuuagauguuccaaauuuaguaagcuuaaggcggccuacagaagaaaaagaaaaaaaaggccacaaaaguucccucucacuuucaguaaauaaaauaaaagcagcaacagaaauaaagaaauaaaugaaauucaaaaugaaauaaauauuguguugugcagcauuaaaaaaucaauaaaaauuaaaaaugagcaagaucuaaaaaaaaaaaaaaaaaaaaaaaaaaaaaaaaaaaaaaaaaaaaaaaaaaaaaaaaaaaaaaaagaauu

SEQ ID NO: 168 - RNA, 1146 nt, Artificial Sequence
  mRNA product Mp68_(2010107E04Rik)_HsEPO(GC)_Gnas_A64-C30-histoneSL
gggagacuuucccauucuguagcagaauuugguguugccuguggucuuggucccgcggagaagcuuaccaugggcgugcacgagugccccgccuggcuguggcuccugcugagccuccugucccugccgcucgggcugcccguccugggcgcccccccgcggcucaucugcgacagccgcgugcuggagcgguaccugcucgaggcgaaggaggccgagaacaucaccaccgggugcgccgagcacugcucccugaacgagaacaucacggugccggacaccaaggucaacuucuacgccuggaagcgcauggaggugggccagcaggccguggaggucuggcaggggcuggcgcuccugagcgaggccgugcugcggggccaggcccuccuggugaacuccagccagcccugggagccccugcagcuccacgucgacaaggccguguccggccugcgcagccugaccacccuccugcgggcgcugggggcccagaaggaggccaucucccccccggacgccgccagcgcggccccgcuccgcacgaucaccgccgacaccuuccggaagcuguuccgcguguacuccaacuuccugcggggcaagcucaagcuguacaccggggaggccugccgcacgggcgaccggugaggacuagugaagggaacacccaaauuuaauucagccuuaagcacaauuaauuaagagugaaacguaauuguacaagcaguuggucacccaccauagggcaugaucaacaccgcaaccuuuccuuuuucccccagugauucugaaaaaccccucuucccuucagcuugcuuagauguuccaaauuuaguaagcuuaaggcggccuacagaagaaaaagaaaaaaaaggccacaaaaguucccucucacuuucaguaaauaaaauaaaagcagcaacagaaauaaagaaauaaaugaaauucaaaaugaaauaaauauuguguugugcagcauuaaaaaaucaauaaaaauuaaaaaugagcaagaucuaaaaaaaaaaaaaaaaaaaaaaaaaaaaaaaaaaaaaaaaaaaaaaaaaaaaaaaaaaaaaaaaugcaucccccccccccccccccccccccccccccccaaaggcucuuuucagagccaccagaauu

SEQ ID NO: 169 - RNA, 1087 nt, Artificial Sequence
  mRNA product Mp68_(2010107E04Rik)_HsEPO(GC)_Gnas_A64
gggagacuuucccauucuguagcagaauuugguguugccuguggucuuggucccgcggagaagcuuaccaugggcgugcacgagugccccgccuggcuguggcuccugcugagccuccugucccugccgcucgggcugcccguccugggcgcccccccgcggcucaucugcgacagccgcgugcuggagcgguaccugcucgaggcgaaggaggccgagaacaucaccaccgggugcgccgagcacugcucccugaacgagaacaucacggugccggacaccaaggucaacuucuacgccuggaagcgcauggaggugggccagcaggccguggaggucuggcaggggcuggcgcuccugagcgaggccgugcugcggggccaggcccuccuggugaacuccagccagcccugggagccccugcagcuccacgucgacaaggccguguccggccugcgcagccugaccacccuccugcgggcgcugggggcccagaaggaggccaucucccccccggacgccgccagcgcggccccgcuccgcacgaucaccgccgacaccuuccggaagcuguuccgcguguacuccaacuuccugcggggcaagcucaagcuguacaccggggaggccugccgcacgggcgaccggugaggacuagugaagggaacacccaaauuuaauucagccuuaagcacaauuaauuaagagugaaacguaauuguacaagcaguuggucacccaccauagggcaugaucaacaccgcaaccuuuccuuuuucccccagugauucugaaaaaccccucuucccuucagcuugcuuagauguuccaaauuuaguaagcuuaaggcggccuacagaagaaaaagaaaaaaaaggccacaaaaguucccucucacuuucaguaaauaaaauaaaagcagcaacagaaauaaagaaauaaaugaaauucaaaaugaaauaaauauuguguugugcagcauuaaaaaaucaauaaaaauuaaaaaugagcaagaucuaaaaaaaaaaaaaaaaaaaaaaaaaaaaaaaaaaaaaaaaaaaaaaaaaaaaaaaaaaaaaaaagaauu

SEQ ID NO: 170 - RNA, 2217 nt, Artificial Sequence
  mRNA product Mp68_(2010107E04Rik)_PpLuc(GC)_Gnas_A64-C30-histoneSL
gggagacuuucccauucuguagcagaauuugguguugccuguggucuuggucccgcggagaagcuuaccauggaggacgccaagaacaucaagaagggcccggcgcccuucuacccgcuggaggacgggaccgccggcgagcagcuccacaaggccaugaagcgguacgcccuggugccgggcacgaucgccuucaccgacgcccacaucgaggucgacaucaccuacgcggaguacuucgagaugagcgugcgccuggccgaggccaugaagcgguacggccugaacaccaaccaccggaucguggugugcucggagaacagccugcaguucuucaugccggugcugggcgcccucuucaucggcguggccgucgccccggcgaacgacaucuacaacgagcgggagcugcugaacagcauggggaucagccagccgaccgugguguucgugagcaagaagggccugcagaagauccugaacgugcagaagaagcugcccaucauccagaagaucaucaucauggacagcaagaccgacuaccagggcuuccagucgauguacacguucgugaccagccaccucccgccgggcuucaacgaguacgacuucgucccggagagcuucgaccgggacaagaccaucgcccugaucaugaacagcagcggcagcaccggccugccgaaggggguggcccugccgcaccggaccgccugcgugcgcuucucgcacgcccgggaccccaucuucggcaaccagaucaucccggacaccgccauccugagcguggugccguuccaccacggcuucggcauguucacgacccugggcuaccucaucugcggcuuccgggugguccugauguaccgguucgaggaggagcuguuccugcggagccugcaggacuacaagauccagagcgcgcugcucgugccgacccuguucagcuucuucgccaagagcacccugaucgacaaguacgaccugucgaaccugcacgagaucgccagcgggggcgccccgcugagcaaggaggugggcgaggccguggccaagcgguuccaccucccgggcauccgccagggcuacggccugaccgagaccacgagcgcgauccugaucacccccgagggggacgacaagccgggcgccgugggcaagguggucccguucuucgaggccaaggugguggaccuggacaccggcaagacccugggcgugaaccagcggggcgagcugugcgugcgggggccgaugaucaugagcggcuacgugaacaacccggaggccaccaacgcccucaucgacaaggacggcuggcugcacagcggcgacaucgccuacugggacgaggacgagcacuucuucaucgucgaccggcugaagucgcugaucaaguacaagggcuaccagguggcgccggccgagcuggagagcauccugcuccagcaccccaacaucuucgacgccggcguggccgggcugccggacgacgacgccggcgagcugccggccgcggugguggugcuggagcacggcaagaccaugacggagaaggagaucgucgacuacguggccagccaggugaccaccgccaagaagcugcggggcggcgugguguucguggacgaggucccgaagggccugaccgggaagcucgacgcccggaagauccgcgagauccugaucaaggccaagaagggcggcaagaucgccgugugaggacuagugaagggaacacccaaauuuaauucagccuuaagcacaauuaauuaagagugaaacguaauuguacaagcaguuggucacccaccauagggcaugaucaacaccgcaaccuuuccuuuuucccccagugauucugaaaaaccccucuucccuucagcuugcuuagauguuccaaauuuaguaagcuuaaggcggccuacagaagaaaaagaaaaaaaaggccacaaaaguucccucucacuuucaguaaauaaaauaaaagcagcaacagaaauaaagaaauaaaugaaauucaaaaugaaauaaauauuguguugugcagcauuaaaaaaucaauaaaaauuaaaaaugagcaagaucuaaaaaaaaaaaaaaaaaaaaaaaaaaaaaaaaaaaaaaaaaaaaaaaaaaaaaaaaaaaaaaaaugcaucccccccccccccccccccccccccccccccaaaggcucuuuucagagccaccagaauu

SEQ ID NO: 171 - RNA, 2158 nt, Artificial Sequence
  mRNA product Mp68_(2010107E04Rik)_PpLuc(GC)_Gnas_A64
gggagacuuucccauucuguagcagaauuugguguugccuguggucuuggucccgcggagaagcuuaccauggaggacgccaagaacaucaagaagggcccggcgcccuucuacccgcuggaggacgggaccgccggcgagcagcuccacaaggccaugaagcgguacgcccuggugccgggcacgaucgccuucaccgacgcccacaucgaggucgacaucaccuacgcggaguacuucgagaugagcgugcgccuggccgaggccaugaagcgguacggccugaacaccaaccaccggaucguggugugcucggagaacagccugcaguucuucaugccggugcugggcgcccucuucaucggcguggccgucgccccggcgaacgacaucuacaacgagcgggagcugcugaacagcauggggaucagccagccgaccgugguguucgugagcaagaagggccugcagaagauccugaacgugcagaagaagcugcccaucauccagaagaucaucaucauggacagcaagaccgacuaccagggcuuccagucgauguacacguucgugaccagccaccucccgccgggcuucaacgaguacgacuucgucccggagagcuucgaccgggacaagaccaucgcccugaucaugaacagcagcggcagcaccggccugccgaaggggguggcccugccgcaccggaccgccugcgugcgcuucucgcacgcccgggaccccaucuucggcaaccagaucaucccggacaccgccauccugagcguggugccguuccaccacggcuucggcauguucacgacccugggcuaccucaucugcggcuuccgggugguccugauguaccgguucgaggaggagcuguuccugcggagccugcaggacuacaagauccagagcgcgcugcucgugccgacccuguucagcuucuucgccaagagcacccugaucgacaaguacgaccugucgaaccugcacgagaucgccagcgggggcgccccgcugagcaaggaggugggcgaggccguggccaagcgguuccaccucccgggcauccgccagggcuacggccugaccgagaccacgagcgcgauccugaucacccccgagggggacgacaagccgggcgccgugggcaagguggucccguucuucgaggccaaggugguggaccuggacaccggcaagacccugggcgugaaccagcggggcgagcugugcgugcgggggccgaugaucaugagcggcuacgugaacaacccggaggccaccaacgcccucaucgacaaggacggcuggcugcacagcggcgacaucgccuacugggacgaggacgagcacuucuucaucgucgaccggcugaagucgcugaucaaguacaagggcuaccagguggcgccggccgagcuggagagcauccugcuccagcaccccaacaucuucgacgccggcguggccgggcugccggacgacgacgccggcgagcugccggccgcggugguggugcuggagcacggcaagaccaugacggagaaggagaucgucgacuacguggccagccaggugaccaccgccaagaagcugcggggcggcgugguguucguggacgaggucccgaagggccugaccgggaagcucgacgcccggaagauccgcgagauccugaucaaggccaagaagggcggcaagaucgccgugugaggacuagugaagggaacacccaaauuuaauucagccuuaagcacaauuaauuaagagugaaacguaauuguacaagcaguuggucacccaccauagggcaugaucaacaccgcaaccuuuccuuuuucccccagugauucugaaaaaccccucuucccuucagcuugcuuagauguuccaaauuuaguaagcuuaaggcggccuacagaagaaaaagaaaaaaaaggccacaaaaguucccucucacuuucaguaaauaaaauaaaagcagcaacagaaauaaagaaauaaaugaaauucaaaaugaaauaaauauuguguugugcagcauuaaaaaaucaauaaaaauuaaaaaugagcaagaucuaaaaaaaaaaaaaaaaaaaaaaaaaaaaaaaaaaaaaaaaaaaaaaaaaaaaaaaaaaaaaaaagaauu

SEQ ID NO: 172 - RNA, 2226 nt, Artificial Sequence
  mRNA product Mp68_protein of interest example 5_Gnas_A64-C30-histoneSL
  misc_feature (70)..(1731): n is a, c, g, or u
gggagacuuucccauucuguagcagaauuugguguugccuguggucuuggucccgcggagaagcuuaccnnnnnnnnnnnnnnnnnnnnnnnnnnnnnnnnnnnnnnnnnnnnnnnnnnnnnnnnnnnnnnnnnnnnnnnnnnnnnnnnnnnnnnnnnnnnnnnnnnnnnnnnnnnnnnnnnnnnnnnnnnnnnnnnnnnnnnnnnnnnnnnnnnnnnnnnnnnnnnnnnnnnnnnnnnnnnnnnnnnnnnnnnnnnnnnnnnnnnnnnnnnnnnnnnnnnnnnnnnnnnnnnnnnnnnnnnnnnnnnnnnnnnnnnnnnnnnnnnnnnnnnnnnnnnnnnnnnnnnnnnnnnnnnnnnnnnnnnnnnnnnnnnnnnnnnnnnnnnnnnnnnnnnnnnnnnnnnnnnnnnnnnnnnnnnnnnnnnnnnnnnnnnnnnnnnnnnnnnnnnnnnnnnnnnnnnnnnnnnnnnnnnnnnnnnnnnnnnnnnnnnnnnnnnnnnnnnnnnnnnnnnnnnnnnnnnnnnnnnnnnnnnnnnnnnnnnnnnnnnnnnnnnnnnnnnnnnnnnnnnnnnnnnnnnnnnnnnnnnnnnnnnnnnnnnnnnnnnnnnnnnnnnnnnnnnnnnnnnnnnnnnnnnnnnnnnnnnnnnnnnnnnnnnnnnnnnnnnnnnnnnnnnnnnnnnnnnnnnnnnnnnnnnnnnnnnnnnnnnnnnnnnnnnnnnnnnnnnnnnnnnnnnnnnnnnnnnnnnnnnnnnnnnnnnnnnnnnnnnnnnnnnnnnnnnnnnnnnnnnnnnnnnnnnnnnnnnnnnnnnnnnnnnnnnnnnnnnnnnnnnnnnnnnnnnnnnnnnnnnnnnnnnnnnnnnnnnnnnnnnnnnnnnnnnnnnnnnnnnnnnnnnnnnnnnnnnnnnnnnnnnnnnnnnnnnnnnnnnnnnnnnnnnnnnnnnnnnnnnnnnnnnnnnnnnnnnnnnnnnnnnnnnnnnnnnnnnnnnnnnnnnnnnnnnnnnnnnnnnnnnnnnnnnnnnnnnnnnnnnnnnnnnnnnnnnnnnnnnnnnnnnnnnnnnnnnnnnnnnnnnnnnnnnnnnnnnnnnnnnnnnnnnnnnnnnnnnnnnnnnnnnnnnnnnnnnnnnnnnnnnnnnnnnnnnnnnnnnnnnnnnnnnnnnnnnnnnnnnnnnnnnnnnnnnnnnnnnnnnnnnnnnnnnnnnnnnnnnnnnnnnnnnnnnnnnnnnnnnnnnnnnnnnnnnnnnnnnnnnnnnnnnnnnnnnnnnnnnnnnnnnnnnnnnnnnnnnnnnnnnnnnnnnnnnnnnnnnnnnnnnnnnnnnnnnnnnnnnnnnnnnnnnnnnnnnnnnnnnnnnnnnnnnnnnnnnnnnnnnnnnnnnnnnnnnnnnnnnnnnnnnnnnnnnnnnnnnnnnnnnnnnnnnnnnnnnnnnnnnnnnnnnnnnnnnnnnnnnnnnnnnnnnnnnnnnnnnnnnnnnnnnnnnnnnnnnnnnnnnnnnnnnnnnnnnnnnnnnnnnnnnnnnnnnnnnnnnnnnnnnnnnnnnnnnnnnnnnnnnnnnnnnnnnnnnnnnnnnnnnnnnnnnnnnnnnnnnnnnnnnnnnnnnnnnnnnnnnnnnnnnnnnnnnnnnnnnnnnnnnnnnnnnnnnnnnnnnnnnnnnnnnnnnnnnnnnnnnnnnnnnnnnnnnnnnnnnnnnnnnnnnnnnnnnnnnnnnnnnnnnnnnnnnnnnnnnnnnnnnnnnnggacuagugaagggaacacccaaauuuaauucagccuuaagcacaauuaauuaagagugaaacguaauuguacaagcaguuggucacccaccauagggcaugaucaacaccgcaaccuuuccuuuuucccccagugauucugaaaaaccccucuucccuucagcuugcuuagauguuccaaauuuaguaagcuuaaggcggccuacagaagaaaaagaaaaaaaaggccacaaaaguucccucucacuuucaguaaauaaaauaaaagcagcaacagaaauaaagaaauaaaugaaauucaaaaugaaauaaauauuguguugugcagcauuaaaaaaucaauaaaaauuaaaaaugagcaagaucuaaaaaaaaaaaaaaaaaaaaaaaaaaaaaaaaaaaaaaaaaaaaaaaaaaaaaaaaaaaaaaaaugcaucccccccccccccccccccccccccccccccaaaggcucuuuucagagccaccagaauu

SEQ ID NO: 173 - RNA, 1919 nt, Artificial Sequence
  mRNA product Mp68_(2010107E04Rik)_RAV-G(GC)_Ndufa1_A64-C30-histoneSL
gggagacuuucccauucuguagcagaauuugguguugccuguggucuuggucccgcggagaagcuuaccauggugccccaggcccuccuguucgucccgcugcugguguucccccucugcuucggcaaguuccccaucuacaccauccccgacaagcuggggccguggagccccaucgacauccaccaccuguccugccccaacaaccucguggucgaggacgagggcugcaccaaccugagcggguucuccuacauggagcugaaggugggcuacaucagcgccaucaagaugaacggguucacgugcaccggcguggucaccgaggcggagaccuacacgaacuucgugggcuacgugaccaccaccuucaagcggaagcacuuccgccccacgccggacgccugccgggccgccuacaacuggaagauggccggggacccccgcuacgaggagucccuccacaaccccuaccccgacuaccacuggcugcggaccgucaagaccaccaaggagagccuggugaucaucuccccgagcguggcggaccucgaccccuacgaccgcucccugcacagccgggucuuccccggcgggaacugcuccggcguggccgugagcuccacguacugcagcaccaaccacgacuacaccaucuggaugcccgagaacccgcgccuggggauguccugcgacaucuucaccaacagccggggcaagcgcgccuccaagggcagcgagacgugcggguucgucgacgagcggggccucuacaagucccugaagggggccugcaagcugaagcucugcggcgugcugggccugcgccucauggacgggaccuggguggcgaugcagaccagcaacgagaccaaguggugcccccccggccagcuggucaaccugcacgacuuccggagcgacgagaucgagcaccucgugguggaggagcuggucaagaagcgcgaggagugccuggacgcccucgaguccaucaugacgaccaagagcguguccuuccggcgccugagccaccuccggaagcuggugcccggguucggcaaggccuacaccaucuucaacaagacccugauggaggccgacgcccacuacaaguccguccgcacguggaacgagaucaucccgagcaaggggugccugcgggugggcggccgcugccacccccacgucaacgggguguucuucaacggcaucauccucgggcccgacggcaacgugcugauccccgagaugcaguccagccugcuccagcagcacauggagcugcuggucuccagcgugaucccgcucaugcacccccuggcggaccccuccaccguguucaagaacggggacgaggccgaggacuucgucgaggugcaccuccccgacgugcacgagcggaucagcggcgucgaccugggccugccgaacugggggaaguacgugcugcucuccgccggcgcccugaccgcccugaugcugaucaucuuccucaugaccugcuggcgccgggugaaccggagcgagcccacgcagcacaaccugcgcgggaccggccgggaggucuccgugaccccgcagagcgggaagaucaucuccagcugggaguccuacaagagcggcggcgagaccgggcugugaggacuaguggaagcauuuuccuggcugauuaaaagaaauuacucagcuauggucaucuguuccuguuagaaggcuaugcagcauauuauauacuaugcgcauguuaugaaaugcauaauaaaaaauuuuaaaaaaucuaaaagaucuaaaaaaaaaaaaaaaaaaaaaaaaaaaaaaaaaaaaaaaaaaaaaaaaaaaaaaaaaaaaaaaaugcaucccccccccccccccccccccccccccccccaaaggcucuuuucagagccaccagaauu

SEQ ID NO: 174 - RNA, 1860 nt, Artificial Sequence
  mRNA product Mp68_(2010107E04Rik)_RAV-G(GC)_Ndufa1_A64
gggagacuuucccauucuguagcagaauuugguguugccuguggucuuggucccgcggagaagcuuaccauggugccccaggcccuccuguucgucccgcugcugguguucccccucugcuucggcaaguuccccaucuacaccauccccgacaagcuggggccguggagccccaucgacauccaccaccuguccugccccaacaaccucguggucgaggacgagggcugcaccaaccugagcggguucuccuacauggagcugaaggugggcuacaucagcgccaucaagaugaacggguucacgugcaccggcguggucaccgaggcggagaccuacacgaacuucgugggcuacgugaccaccaccuucaagcggaagcacuuccgccccacgccggacgccugccgggccgccuacaacuggaagauggccggggacccccgcuacgaggagucccuccacaaccccuaccccgacuaccacuggcugcggaccgucaagaccaccaaggagagccuggugaucaucuccccgagcguggcggaccucgaccccuacgaccgcucccugcacagccgggucuuccccggcgggaacugcuccggcguggccgugagcuccacguacugcagcaccaaccacgacuacaccaucuggaugcccgagaacccgcgccuggggauguccugcgacaucuucaccaacagccggggcaagcgcgccuccaagggcagcgagacgugcggguucgucgacgagcggggccucuacaagucccugaagggggccugcaagcugaagcucugcggcgugcugggccugcgccucauggacgggaccuggguggcgaugcagaccagcaacgagaccaaguggugcccccccggccagcuggucaaccugcacgacuuccggagcgacgagaucgagcaccucgugguggaggagcuggucaagaagcgcgaggagugccuggacgcccucgaguccaucaugacgaccaagagcguguccuuccggcgccugagccaccuccggaagcuggugcccggguucggcaaggccuacaccaucuucaacaagacccugauggaggccgacgcccacuacaaguccguccgcacguggaacgagaucaucccgagcaaggggugccugcgggugggcggccgcugccacccccacgucaacgggguguucuucaacggcaucauccucgggcccgacggcaacgugcugauccccgagaugcaguccagccugcuccagcagcacauggagcugcuggucuccagcgugaucccgcucaugcacccccuggcggaccccuccaccguguucaagaacggggacgaggccgaggacuucgucgaggugcaccuccccgacgugcacgagcggaucagcggcgucgaccugggccugccgaacugggggaaguacgugcugcucuccgccggcgcccugaccgcccugaugcugaucaucuuccucaugaccugcuggcgccgggugaaccggagcgagcccacgcagcacaaccugcgcgggaccggccgggaggucuccgugaccccgcagagcgggaagaucaucuccagcugggaguccuacaagagcggcggcgagaccgggcugugaggacuaguggaagcauuuuccuggcugauuaaaagaaauuacucagcuauggucaucuguuccuguuagaaggcuaugcagcauauuauauacuaugcgcauguuaugaaaugcauaauaaaaaauuuuaaaaaaucuaaaagaucuaaaaaaaaaaaaaaaaaaaaaaaaaaaaaaaaaaaaaaaaaaaaaaaaaaaaaaaaaaaaaaaagaauu

SEQ ID NO: 175 - RNA, 926 nt, Artificial Sequence
  mRNA product Mp68_(2010107E04Rik)_HsEPO(GC)_Ndufa1_A64-C30-histoneSL
gggagacuuucccauucuguagcagaauuugguguugccuguggucuuggucccgcggagaagcuuaccaugggcgugcacgagugccccgccuggcuguggcuccugcugagccuccugucccugccgcucgggcugcccguccugggcgcccccccgcggcucaucugcgacagccgcgugcuggagcgguaccugcucgaggcgaaggaggccgagaacaucaccaccgggugcgccgagcacugcucccugaacgagaacaucacggugccggacaccaaggucaacuucuacgccuggaagcgcauggaggugggccagcaggccguggaggucuggcaggggcuggcgcuccugagcgaggccgugcugcggggccaggcccuccuggugaacuccagccagcccugggagccccugcagcuccacgucgacaaggccguguccggccugcgcagccugaccacccuccugcgggcgcugggggcccagaaggaggccaucucccccccggacgccgccagcgcggccccgcuccgcacgaucaccgccgacaccuuccggaagcuguuccgcguguacuccaacuuccugcggggcaagcucaagcuguacaccggggaggccugccgcacgggcgaccggugaggacuaguggaagcauuuuccuggcugauuaaaagaaauuacucagcuauggucaucuguuccuguuagaaggcuaugcagcauauuauauacuaugcgcauguuaugaaaugcauaauaaaaaauuuuaaaaaaucuaaaagaucuaaaaaaaaaaaaaaaaaaaaaaaaaaaaaaaaaaaaaaaaaaaaaaaaaaaaaaaaaaaaaaaaugcaucccccccccccccccccccccccccccccccaaaggcucuuuucagagccaccagaauu

SEQ ID NO: 176 - RNA, 867 nt, Artificial Sequence
  mRNA product Mp68_(2010107E04Rik)_HsEPO(GC)_Ndufa1_A64
gggagacuuucccauucuguagcagaauuugguguugccuguggucuuggucccgcggagaagcuuaccaugggcgugcacgagugccccgccuggcuguggcuccugcugagccuccugucccugccgcucgggcugcccguccugggcgcccccccgcggcucaucugcgacagccgcgugcuggagcgguaccugcucgaggcgaaggaggccgagaacaucaccaccgggugcgccgagcacugcucccugaacgagaacaucacggugccggacaccaaggucaacuucuacgccuggaagcgcauggaggugggccagcaggccguggaggucuggcaggggcuggcgcuccugagcgaggccgugcugcggggccaggcccuccuggugaacuccagccagcccugggagccccugcagcuccacgucgacaaggccguguccggccugcgcagccugaccacccuccugcgggcgcugggggcccagaaggaggccaucucccccccggacgccgccagcgcggccccgcuccgcacgaucaccgccgacaccuuccggaagcuguuccgcguguacuccaacuuccugcggggcaagcucaagcuguacaccggggaggccugccgcacgggcgaccggugaggacuaguggaagcauuuuccuggcugauuaaaagaaauuacucagcuauggucaucuguuccuguuagaaggcuaugcagcauauuauauacuaugcgcauguuaugaaaugcauaauaaaaaauuuuaaaaaaucuaaaagaucuaaaaaaaaaaaaaaaaaaaaaaaaaaaaaaaaaaaaaaaaaaaaaaaaaaaaaaaaaaaaaaaagaauu

SEQ ID NO: 177 - RNA, 1997 nt, Artificial Sequence
  mRNA product Mp68_(2010107E04Rik)_PpLuc(GC)_Ndufa1_A64-C30-histoneSL
gggagacuuucccauucuguagcagaauuugguguugccuguggucuuggucccgcggagaagcuuaccauggaggacgccaagaacaucaagaagggcccggcgcccuucuacccgcuggaggacgggaccgccggcgagcagcuccacaaggccaugaagcgguacgcccuggugccgggcacgaucgccuucaccgacgcccacaucgaggucgacaucaccuacgcggaguacuucgagaugagcgugcgccuggccgaggccaugaagcgguacggccugaacaccaaccaccggaucguggugugcucggagaacagccugcaguucuucaugccggugcugggcgcccucuucaucggcguggccgucgccccggcgaacgacaucuacaacgagcgggagcugcugaacagcauggggaucagccagccgaccgugguguucgugagcaagaagggccugcagaagauccugaacgugcagaagaagcugcccaucauccagaagaucaucaucauggacagcaagaccgacuaccagggcuuccagucgauguacacguucgugaccagccaccucccgccgggcuucaacgaguacgacuucgucccggagagcuucgaccgggacaagaccaucgcccugaucaugaacagcagcggcagcaccggccugccgaaggggguggcccugccgcaccggaccgccugcgugcgcuucucgcacgcccgggaccccaucuucggcaaccagaucaucccggacaccgccauccugagcguggugccguuccaccacggcuucggcauguucacgacccugggcuaccucaucugcggcuuccgggugguccugauguaccgguucgaggaggagcuguuccugcggagccugcaggacuacaagauccagagcgcgcugcucgugccgacccuguucagcuucuucgccaagagcacccugaucgacaaguacgaccugucgaaccugcacgagaucgccagcgggggcgccccgcugagcaaggaggugggcgaggccguggccaagcgguuccaccucccgggcauccgccagggcuacggccugaccgagaccacgagcgcgauccugaucacccccgagggggacgacaagccgggcgccgugggcaagguggucccguucuucgaggccaaggugguggaccuggacaccggcaagacccugggcgugaaccagcggggcgagcugugcgugcgggggccgaugaucaugagcggcuacgugaacaacccggaggccaccaacgcccucaucgacaaggacggcuggcugcacagcggcgacaucgccuacugggacgaggacgagcacuucuucaucgucgaccggcugaagucgcugaucaaguacaagggcuaccagguggcgccggccgagcuggagagcauccugcuccagcaccccaacaucuucgacgccggcguggccgggcugccggacgacgacgccggcgagcugccggccgcggugguggugcuggagcacggcaagaccaugacggagaaggagaucgucgacuacguggccagccaggugaccaccgccaagaagcugcggggcggcgugguguucguggacgaggucccgaagggccugaccgggaagcucgacgcccggaagauccgcgagauccugaucaaggccaagaagggcggcaagaucgccgugugaggacuaguggaagcauuuuccuggcugauuaaaagaaauuacucagcuauggucaucuguuccuguuagaaggcuaugcagcauauuauauacuaugcgcauguuaugaaaugcauaauaaaaaauuuuaaaaaaucuaaaagaucuaaaaaaaaaaaaaaaaaaaaaaaaaaaaaaaaaaaaaaaaaaaaaaaaaaaaaaaaaaaaaaaaugcaucccccccccccccccccccccccccccccccaaaggcucuuuucagagccaccagaauu

SEQ ID NO: 178 - RNA, 1938 nt, Artificial Sequence
  mRNA product Mp68_(2010107E04Rik)_PpLuc(GC)_Ndufa1_A64
gggagacuuucccauucuguagcagaauuugguguugccuguggucuuggucccgcggagaagcuuaccauggaggacgccaagaacaucaagaagggcccggcgcccuucuacccgcuggaggacgggaccgccggcgagcagcuccacaaggccaugaagcgguacgcccuggugccgggcacgaucgccuucaccgacgcccacaucgaggucgacaucaccuacgcggaguacuucgagaugagcgugcgccuggccgaggccaugaagcgguacggccugaacaccaaccaccggaucguggugugcucggagaacagccugcaguucuucaugccggugcugggcgcccucuucaucggcguggccgucgccccggcgaacgacaucuacaacgagcgggagcugcugaacagcauggggaucagccagccgaccgugguguucgugagcaagaagggccugcagaagauccugaacgugcagaagaagcugcccaucauccagaagaucaucaucauggacagcaagaccgacuaccagggcuuccagucgauguacacguucgugaccagccaccucccgccgggcuucaacgaguacgacuucgucccggagagcuucgaccgggacaagaccaucgcccugaucaugaacagcagcggcagcaccggccugccgaaggggguggcccugccgcaccggaccgccugcgugcgcuucucgcacgcccgggaccccaucuucggcaaccagaucaucccggacaccgccauccugagcguggugccguuccaccacggcuucggcauguucacgacccugggcuaccucaucugcggcuuccgggugguccugauguaccgguucgaggaggagcuguuccugcggagccugcaggacuacaagauccagagcgcgcugcucgugccgacccuguucagcuucuucgccaagagcacccugaucgacaaguacgaccugucgaaccugcacgagaucgccagcgggggcgccccgcugagcaaggaggugggcgaggccguggccaagcgguuccaccucccgggcauccgccagggcuacggccugaccgagaccacgagcgcgauccugaucacccccgagggggacgacaagccgggcgccgugggcaagguggucccguucuucgaggccaaggugguggaccuggacaccggcaagacccugggcgugaaccagcggggcgagcugugcgugcgggggccgaugaucaugagcggcuacgugaacaacccggaggccaccaacgcccucaucgacaaggacggcuggcugcacagcggcgacaucgccuacugggacgaggacgagcacuucuucaucgucgaccggcugaagucgcugaucaaguacaagggcuaccagguggcgccggccgagcuggagagcauccugcuccagcaccccaacaucuucgacgccggcguggccgggcugccggacgacgacgccggcgagcugccggccgcggugguggugcuggagcacggcaagaccaugacggagaaggagaucgucgacuacguggccagccaggugaccaccgccaagaagcugcggggcggcgugguguucguggacgaggucccgaagggccugaccgggaagcucgacgcccggaagauccgcgagauccugaucaaggccaagaagggcggcaagaucgccgugugaggacuaguggaagcauuuuccuggcugauuaaaagaaauuacucagcuauggucaucuguuccuguuagaaggcuaugcagcauauuauauacuaugcgcauguuaugaaaugcauaauaaaaaauuuuaaaaaaucuaaaagaucuaaaaaaaaaaaaaaaaaaaaaaaaaaaaaaaaaaaaaaaaaaaaaaaaaaaaaaaaaaaaaaaagaauu

SEQ ID NO: 179 - RNA, 2006 nt, Artificial Sequence
  mRNA product Mp68_protein of interest example 5_Ndufa1_A64-C30-histoneSL
  misc_feature (70)..(1731): n is a, c, g, or u
gggagacuuucccauucuguagcagaauuugguguugccuguggucuuggucccgcggagaagcuuaccnnnnnnnnnnnnnnnnnnnnnnnnnnnnnnnnnnnnnnnnnnnnnnnnnnnnnnnnnnnnnnnnnnnnnnnnnnnnnnnnnnnnnnnnnnnnnnnnnnnnnnnnnnnnnnnnnnnnnnnnnnnnnnnnnnnnnnnnnnnnnnnnnnnnnnnnnnnnnnnnnnnnnnnnnnnnnnnnnnnnnnnnnnnnnnnnnnnnnnnnnnnnnnnnnnnnnnnnnnnnnnnnnnnnnnnnnnnnnnnnnnnnnnnnnnnnnnnnnnnnnnnnnnnnnnnnnnnnnnnnnnnnnnnnnnnnnnnnnnnnnnnnnnnnnnnnnnnnnnnnnnnnnnnnnnnnnnnnnnnnnnnnnnnnnnnnnnnnnnnnnnnnnnnnnnnnnnnnnnnnnnnnnnnnnnnnnnnnnnnnnnnnnnnnnnnnnnnnnnnnnnnnnnnnnnnnnnnnnnnnnnnnnnnnnnnnnnnnnnnnnnnnnnnnnnnnnnnnnnnnnnnnnnnnnnnnnnnnnnnnnnnnnnnnnnnnnnnnnnnnnnnnnnnnnnnnnnnnnnnnnnnnnnnnnnnnnnnnnnnnnnnnnnnnnnnnnnnnnnnnnnnnnnnnnnnnnnnnnnnnnnnnnnnnnnnnnnnnnnnnnnnnnnnnnnnnnnnnnnnnnnnnnnnnnnnnnnnnnnnnnnnnnnnnnnnnnnnnnnnnnnnnnnnnnnnnnnnnnnnnnnnnnnnnnnnnnnnnnnnnnnnnnnnnnnnnnnnnnnnnnnnnnnnnnnnnnnnnnnnnnnnnnnnnnnnnnnnnnnnnnnnnnnnnnnnnnnnnnnnnnnnnnnnnnnnnnnnnnnnnnnnnnnnnnnnnnnnnnnnnnnnnnnnnnnnnnnnnnnnnnnnnnnnnnnnnnnnnnnnnnnnnnnnnnnnnnnnnnnnnnnnnnnnnnnnnnnnnnnnnnnnnnnnnnnnnnnnnnnnnnnnnnnnnnnnnnnnnnnnnnnnnnnnnnnnnnnnnnnnnnnnnnnnnnnnnnnnnnnnnnnnnnnnnnnnnnnnnnnnnnnnnnnnnnnnnnnnnnnnnnnnnnnnnnnnnnnnnnnnnnnnnnnnnnnnnnnnnnnnnnnnnnnnnnnnnnnnnnnnnnnnnnnnnnnnnnnnnnnnnnnnnnnnnnnnnnnnnnnnnnnnnnnnnnnnnnnnnnnnnnnnnnnnnnnnnnnnnnnnnnnnnnnnnnnnnnnnnnnnnnnnnnnnnnnnnnnnnnnnnnnnnnnnnnnnnnnnnnnnnnnnnnnnnnnnnnnnnnnnnnnnnnnnnnnnnnnnnnnnnnnnnnnnnnnnnnnnnnnnnnnnnnnnnnnnnnnnnnnnnnnnnnnnnnnnnnnnnnnnnnnnnnnnnnnnnnnnnnnnnnnnnnnnnnnnnnnnnnnnnnnnnnnnnnnnnnnnnnnnnnnnnnnnnnnnnnnnnnnnnnnnnnnnnnnnnnnnnnnnnnnnnnnnnnnnnnnnnnnnnnnnnnnnnnnnnnnnnnnnnnnnnnnnnnnnnnnnnnnnnnnnnnnnnnnnnnnnnnnnnnnnnnnnnnnnnnnnnnnnnnnnnnnnnnnnnnnnnnnnnnnnnnnnnnnnnnnnnnnnnnnnnnnnnnnnnnnnnnnnnnnnnnnnnnnnnnnnnnnnnnnnnnnnnnnnnnnnnnnnnnnnnnnnnnnnnnnnnnnnnnnggacuaguggaagcauuuuccuggcugauuaaaagaaauuacucagcuauggucaucuguuccuguuagaaggcuaugcagcauauuauauacuaugcgcauguuaugaaaugcauaauaaaaaauuuuaaaaaaucuaaaagaucuaaaaaaaaaaaaaaaaaaaaaaaaaaaaaaaaaaaaaaaaaaaaaaaaaaaaaaaaaaaaaaaaugcaucccccccccccccccccccccccccccccccaaaggcucuuuucagagccaccagaauu

SEQ ID NO: 180 - RNA, 1856 nt, Artificial Sequence
  mRNA product Mp68_(2010107E04Rik)_RAV-G(GC)_RPS9_A64-C30-histoneSL
gggagacuuucccauucuguagcagaauuugguguugccuguggucuuggucccgcggagaagcuuaccauggugccccaggcccuccuguucgucccgcugcugguguucccccucugcuucggcaaguuccccaucuacaccauccccgacaagcuggggccguggagccccaucgacauccaccaccuguccugccccaacaaccucguggucgaggacgagggcugcaccaaccugagcggguucuccuacauggagcugaaggugggcuacaucagcgccaucaagaugaacggguucacgugcaccggcguggucaccgaggcggagaccuacacgaacuucgugggcuacgugaccaccaccuucaagcggaagcacuuccgccccacgccggacgccugccgggccgccuacaacuggaagauggccggggacccccgcuacgaggagucccuccacaaccccuaccccgacuaccacuggcugcggaccgucaagaccaccaaggagagccuggugaucaucuccccgagcguggcggaccucgaccccuacgaccgcucccugcacagccgggucuuccccggcgggaacugcuccggcguggccgugagcuccacguacugcagcaccaaccacgacuacaccaucuggaugcccgagaacccgcgccuggggauguccugcgacaucuucaccaacagccggggcaagcgcgccuccaagggcagcgagacgugcggguucgucgacgagcggggccucuacaagucccugaagggggccugcaagcugaagcucugcggcgugcugggccugcgccucauggacgggaccuggguggcgaugcagaccagcaacgagaccaaguggugcccccccggccagcuggucaaccugcacgacuuccggagcgacgagaucgagcaccucgugguggaggagcuggucaagaagcgcgaggagugccuggacgcccucgaguccaucaugacgaccaagagcguguccuuccggcgccugagccaccuccggaagcuggugcccggguucggcaaggccuacaccaucuucaacaagacccugauggaggccgacgcccacuacaaguccguccgcacguggaacgagaucaucccgagcaaggggugccugcgggugggcggccgcugccacccccacgucaacgggguguucuucaacggcaucauccucgggcccgacggcaacgugcugauccccgagaugcaguccagccugcuccagcagcacauggagcugcuggucuccagcgugaucccgcucaugcacccccuggcggaccccuccaccguguucaagaacggggacgaggccgaggacuucgucgaggugcaccuccccgacgugcacgagcggaucagcggcgucgaccugggccugccgaacugggggaaguacgugcugcucuccgccggcgcccugaccgcccugaugcugaucaucuuccucaugaccugcuggcgccgggugaaccggagcgagcccacgcagcacaaccugcgcgggaccggccgggaggucuccgugaccccgcagagcgggaagaucaucuccagcugggaguccuacaagagcggcggcgagaccgggcugugaggacuaguguccaccugucccuccugggcugcuggauugucucguuuuccugccaaauaaacaggaucagcgcuuuacagaucuaaaaaaaaaaaaaaaaaaaaaaaaaaaaaaaaaaaaaaaaaaaaaaaaaaaaaaaaaaaaaaaaugcaucccccccccccccccccccccccccccccccaaaggcucuuuucagagccaccagaauu

SEQ ID NO: 181 - RNA, 1797 nt, Artificial Sequence
  mRNA product Mp68_(2010107E04Rik)_RAV-G(GC)_RPS9_A64
gggagacuuucccauucuguagcagaauuugguguugccuguggucuuggucccgcggagaagcuuaccauggugccccaggcccuccuguucgucccgcugcugguguucccccucugcuucggcaaguuccccaucuacaccauccccgacaagcuggggccguggagccccaucgacauccaccaccuguccugccccaacaaccucguggucgaggacgagggcugcaccaaccugagcggguucuccuacauggagcugaaggugggcuacaucagcgccaucaagaugaacggguucacgugcaccggcguggucaccgaggcggagaccuacacgaacuucgugggcuacgugaccaccaccuucaagcggaagcacuuccgccccacgccggacgccugccgggccgccuacaacuggaagauggccggggacccccgcuacgaggagucccuccacaaccccuaccccgacuaccacuggcugcggaccgucaagaccaccaaggagagccuggugaucaucuccccgagcguggcggaccucgaccccuacgaccgcucccugcacagccgggucuuccccggcgggaacugcuccggcguggccgugagcuccacguacugcagcaccaaccacgacuacaccaucuggaugcccgagaacccgcgccuggggauguccugcgacaucuucaccaacagccggggcaagcgcgccuccaagggcagcgagacgugcggguucgucgacgagcggggccucuacaagucccugaagggggccugcaagcugaagcucugcggcgugcugggccugcgccucauggacgggaccuggguggcgaugcagaccagcaacgagaccaaguggugcccccccggccagcuggucaaccugcacgacuuccggagcgacgagaucgagcaccucgugguggaggagcuggucaagaagcgcgaggagugccuggacgcccucgaguccaucaugacgaccaagagcguguccuuccggcgccugagccaccuccggaagcuggugcccggguucggcaaggccuacaccaucuucaacaagacccugauggaggccgacgcccacuacaaguccguccgcacguggaacgagaucaucccgagcaaggggugccugcgggugggcggccgcugccacccccacgucaacgggguguucuucaacggcaucauccucgggcccgacggcaacgugcugauccccgagaugcaguccagccugcuccagcagcacauggagcugcuggucuccagcgugaucccgcucaugcacccccuggcggaccccuccaccguguucaagaacggggacgaggccgaggacuucgucgaggugcaccuccccgacgugcacgagcggaucagcggcgucgaccugggccugccgaacugggggaaguacgugcugcucuccgccggcgcccugaccgcccugaugcugaucaucuuccucaugaccugcuggcgccgggugaaccggagcgagcccacgcagcacaaccugcgcgggaccggccgggaggucuccgugaccccgcagagcgggaagaucaucuccagcugggaguccuacaagagcggcggcgagaccgggcugugaggacuaguguccaccugucccuccugggcugcuggauugucucguuuuccugccaaauaaacaggaucagcgcuuuacagaucuaaaaaaaaaaaaaaaaaaaaaaaaaaaaaaaaaaaaaaaaaaaaaaaaaaaaaaaaaaaaaaaagaauu

SEQ ID NO: 182 - RNA, 863 nt, Artificial Sequence
  mRNA product Mp68_(2010107E04Rik)_HsEPO(GC)_RPS9_A64-C30-histoneSL
gggagacuuucccauucuguagcagaauuugguguugccuguggucuuggucccgcggagaagcuuaccaugggcgugcacgagugccccgccuggcuguggcuccugcugagccuccugucccugccgcucgggcugcccguccugggcgcccccccgcggcucaucugcgacagccgcgugcuggagcgguaccugcucgaggcgaaggaggccgagaacaucaccaccgggugcgccgagcacugcucccugaacgagaacaucacggugccggacaccaaggucaacuucuacgccuggaagcgcauggaggugggccagcaggccguggaggucuggcaggggcuggcgcuccugagcgaggccgugcugcggggccaggcccuccuggugaacuccagccagcccugggagccccugcagcuccacgucgacaaggccguguccggccugcgcagccugaccacccuccugcgggcgcugggggcccagaaggaggccaucucccccccggacgccgccagcgcggccccgcuccgcacgaucaccgccgacaccuuccggaagcuguuccgcguguacuccaacuuccugcggggcaagcucaagcuguacaccggggaggccugccgcacgggcgaccggugaggacuaguguccaccugucccuccugggcugcuggauugucucguuuuccugccaaauaaacaggaucagcgcuuuacagaucuaaaaaaaaaaaaaaaaaaaaaaaaaaaaaaaaaaaaaaaaaaaaaaaaaaaaaaaaaaaaaaaaugcaucccccccccccccccccccccccccccccccaaaggcucuuuucagagccaccagaauu

SEQ ID NO: 183 - RNA, 804 nt, Artificial Sequence
  mRNA product Mp68_(2010107E04Rik)_HsEPO(GC)_RPS9_A64
gggagacuuucccauucuguagcagaauuugguguugccuguggucuuggucccgcggagaagcuuaccaugggcgugcacgagugccccgccuggcuguggcuccugcugagccuccugucccugccgcucgggcugcccguccugggcgcccccccgcggcucaucugcgacagccgcgugcuggagcgguaccugcucgaggcgaaggaggccgagaacaucaccaccgggugcgccgagcacugcucccugaacgagaacaucacggugccggacaccaaggucaacuucuacgccuggaagcgcauggaggugggccagcaggccguggaggucuggcaggggcuggcgcuccugagcgaggccgugcugcggggccaggcccuccuggugaacuccagccagcccugggagccccugcagcuccacgucgacaaggccguguccggccugcgcagccugaccacccuccugcgggcgcugggggcccagaaggaggccaucucccccccggacgccgccagcgcggccccgcuccgcacgaucaccgccgacaccuuccggaagcuguuccgcguguacuccaacuuccugcggggcaagcucaagcuguacaccggggaggccugccgcacgggcgaccggugaggacuaguguccaccugucccuccugggcugcuggauugucucguuuuccugccaaauaaacaggaucagcgcuuuacagaucuaaaaaaaaaaaaaaaaaaaaaaaaaaaaaaaaaaaaaaaaaaaaaaaaaaaaaaaaaaaaaaaagaauu

SEQ ID NO: 184 - RNA, 1934 nt, Artificial Sequence
  mRNA product Mp68_(2010107E04Rik)_PpLuc(GC)_RPS9_A64-C30-histoneSL
gggagacuuucccauucuguagcagaauuugguguugccuguggucuuggucccgcggagaagcuuaccauggaggacgccaagaacaucaagaagggcccggcgcccuucuacccgcuggaggacgggaccgccggcgagcagcuccacaaggccaugaagcgguacgcccuggugccgggcacgaucgccuucaccgacgcccacaucgaggucgacaucaccuacgcggaguacuucgagaugagcgugcgccuggccgaggccaugaagcgguacggccugaacaccaaccaccggaucguggugugcucggagaacagccugcaguucuucaugccggugcugggcgcccucuucaucggcguggccgucgccccggcgaacgacaucuacaacgagcgggagcugcugaacagcauggggaucagccagccgaccgugguguucgugagcaagaagggccugcagaagauccugaacgugcagaagaagcugcccaucauccagaagaucaucaucauggacagcaagaccgacuaccagggcuuccagucgauguacacguucgugaccagccaccucccgccgggcuucaacgaguacgacuucgucccggagagcuucgaccgggacaagaccaucgcccugaucaugaacagcagcggcagcaccggccugccgaaggggguggcccugccgcaccggaccgccugcgugcgcuucucgcacgcccgggaccccaucuucggcaaccagaucaucccggacaccgccauccugagcguggugccguuccaccacggcuucggcauguucacgacccugggcuaccucaucugcggcuuccgggugguccugauguaccgguucgaggaggagcuguuccugcggagccugcaggacuacaagauccagagcgcgcugcucgugccgacccuguucagcuucuucgccaagagcacccugaucgacaaguacgaccugucgaaccugcacgagaucgccagcgggggcgccccgcugagcaaggaggugggcgaggccguggccaagcgguuccaccucccgggcauccgccagggcuacggccugaccgagaccacgagcgcgauccugaucacccccgagggggacgacaagccgggcgccgugggcaagguggucccguucuucgaggccaaggugguggaccuggacaccggcaagacccugggcgugaaccagcggggcgagcugugcgugcgggggccgaugaucaugagcggcuacgugaacaacccggaggccaccaacgcccucaucgacaaggacggcuggcugcacagcggcgacaucgccuacugggacgaggacgagcacuucuucaucgucgaccggcugaagucgcugaucaaguacaagggcuaccagguggcgccggccgagcuggagagcauccugcuccagcaccccaacaucuucgacgccggcguggccgggcugccggacgacgacgccggcgagcugccggccgcggugguggugcuggagcacggcaagaccaugacggagaaggagaucgucgacuacguggccagccaggugaccaccgccaagaagcugcggggcggcgugguguucguggacgaggucccgaagggccugaccgggaagcucgacgcccggaagauccgcgagauccugaucaaggccaagaagggcggcaagaucgccgugugaggacuaguguccaccugucccuccugggcugcuggauugucucguuuuccugccaaauaaacaggaucagcgcuuuacagaucuaaaaaaaaaaaaaaaaaaaaaaaaaaaaaaaaaaaaaaaaaaaaaaaaaaaaaaaaaaaaaaaaugcaucccccccccccccccccccccccccccccccaaaggcucuuuucagagccaccagaauu

SEQ ID NO: 185 - RNA, 1875 nt, Artificial Sequence
  mRNA product Mp68_(2010107E04Rik)_PpLuc(GC)_RPS9_A64
gggagacuuucccauucuguagcagaauuugguguugccuguggucuuggucccgcggagaagcuuaccauggaggacgccaagaacaucaagaagggcccggcgcccuucuacccgcuggaggacgggaccgccggcgagcagcuccacaaggccaugaagcgguacgcccuggugccgggcacgaucgccuucaccgacgcccacaucgaggucgacaucaccuacgcggaguacuucgagaugagcgugcgccuggccgaggccaugaagcgguacggccugaacaccaaccaccggaucguggugugcucggagaacagccugcaguucuucaugccggugcugggcgcccucuucaucggcguggccgucgccccggcgaacgacaucuacaacgagcgggagcugcugaacagcauggggaucagccagccgaccgugguguucgugagcaagaagggccugcagaagauccugaacgugcagaagaagcugcccaucauccagaagaucaucaucauggacagcaagaccgacuaccagggcuuccagucgauguacacguucgugaccagccaccucccgccgggcuucaacgaguacgacuucgucccggagagcuucgaccgggacaagaccaucgcccugaucaugaacagcagcggcagcaccggccugccgaaggggguggcccugccgcaccggaccgccugcgugcgcuucucgcacgcccgggaccccaucuucggcaaccagaucaucccggacaccgccauccugagcguggugccguuccaccacggcuucggcauguucacgacccugggcuaccucaucugcggcuuccgggugguccugauguaccgguucgaggaggagcuguuccugcggagccugcaggacuacaagauccagagcgcgcugcucgugccgacccuguucagcuucuucgccaagagcacccugaucgacaaguacgaccugucgaaccugcacgagaucgccagcgggggcgccccgcugagcaaggaggugggcgaggccguggccaagcgguuccaccucccgggcauccgccagggcuacggccugaccgagaccacgagcgcgauccugaucacccccgagggggacgacaagccgggcgccgugggcaagguggucccguucuucgaggccaaggugguggaccuggacaccggcaagacccugggcgugaaccagcggggcgagcugugcgugcgggggccgaugaucaugagcggcuacgugaacaacccggaggccaccaacgcccucaucgacaaggacggcuggcugcacagcggcgacaucgccuacugggacgaggacgagcacuucuucaucgucgaccggcugaagucgcugaucaaguacaagggcuaccagguggcgccggccgagcuggagagcauccugcuccagcaccccaacaucuucgacgccggcguggccgggcugccggacgacgacgccggcgagcugccggccgcggugguggugcuggagcacggcaagaccaugacggagaaggagaucgucgacuacguggccagccaggugaccaccgccaagaagcugcggggcggcgugguguucguggacgaggucccgaagggccugaccgggaagcucgacgcccggaagauccgcgagauccugaucaaggccaagaagggcggcaagaucgccgugugaggacuaguguccaccugucccuccugggcugcuggauugucucguuuuccugccaaauaaacaggaucagcgcuuuacagaucuaaaaaaaaaaaaaaaaaaaaaaaaaaaaaaaaaaaaaaaaaaaaaaaaaaaaaaaaaaaaaaaagaauu

SEQ ID NO: 186 - RNA, 1943 nt, Artificial Sequence
  mRNA product Mp68_protein of interest example 5_RPS9_A64-C30-histoneSL
  misc_feature (70)..(1731): n is a, c, g, or u
gggagacuuucccauucuguagcagaauuugguguugccuguggucuuggucccgcggagaagcuuaccnnnnnnnnnnnnnnnnnnnnnnnnnnnnnnnnnnnnnnnnnnnnnnnnnnnnnnnnnnnnnnnnnnnnnnnnnnnnnnnnnnnnnnnnnnnnnnnnnnnnnnnnnnnnnnnnnnnnnnnnnnnnnnnnnnnnnnnnnnnnnnnnnnnnnnnnnnnnnnnnnnnnnnnnnnnnnnnnnnnnnnnnnnnnnnnnnnnnnnnnnnnnnnnnnnnnnnnnnnnnnnnnnnnnnnnnnnnnnnnnnnnnnnnnnnnnnnnnnnnnnnnnnnnnnnnnnnnnnnnnnnnnnnnnnnnnnnnnnnnnnnnnnnnnnnnnnnnnnnnnnnnnnnnnnnnnnnnnnnnnnnnnnnnnnnnnnnnnnnnnnnnnnnnnnnnnnnnnnnnnnnnnnnnnnnnnnnnnnnnnnnnnnnnnnnnnnnnnnnnnnnnnnnnnnnnnnnnnnnnnnnnnnnnnnnnnnnnnnnnnnnnnnnnnnnnnnnnnnnnnnnnnnnnnnnnnnnnnnnnnnnnnnnnnnnnnnnnnnnnnnnnnnnnnnnnnnnnnnnnnnnnnnnnnnnnnnnnnnnnnnnnnnnnnnnnnnnnnnnnnnnnnnnnnnnnnnnnnnnnnnnnnnnnnnnnnnnnnnnnnnnnnnnnnnnnnnnnnnnnnnnnnnnnnnnnnnnnnnnnnnnnnnnnnnnnnnnnnnnnnnnnnnnnnnnnnnnnnnnnnnnnnnnnnnnnnnnnnnnnnnnnnnnnnnnnnnnnnnnnnnnnnnnnnnnnnnnnnnnnnnnnnnnnnnnnnnnnnnnnnnnnnnnnnnnnnnnnnnnnnnnnnnnnnnnnnnnnnnnnnnnnnnnnnnnnnnnnnnnnnnnnnnnnnnnnnnnnnnnnnnnnnnnnnnnnnnnnnnnnnnnnnnnnnnnnnnnnnnnnnnnnnnnnnnnnnnnnnnnnnnnnnnnnnnnnnnnnnnnnnnnnnnnnnnnnnnnnnnnnnnnnnnnnnnnnnnnnnnnnnnnnnnnnnnnnnnnnnnnnnnnnnnnnnnnnnnnnnnnnnnnnnnnnnnnnnnnnnnnnnnnnnnnnnnnnnnnnnnnnnnnnnnnnnnnnnnnnnnnnnnnnnnnnnnnnnnnnnnnnnnnnnnnnnnnnnnnnnnnnnnnnnnnnnnnnnnnnnnnnnnnnnnnnnnnnnnnnnnnnnnnnnnnnnnnnnnnnnnnnnnnnnnnnnnnnnnnnnnnnnnnnnnnnnnnnnnnnnnnnnnnnnnnnnnnnnnnnnnnnnnnnnnnnnnnnnnnnnnnnnnnnnnnnnnnnnnnnnnnnnnnnnnnnnnnnnnnnnnnnnnnnnnnnnnnnnnnnnnnnnnnnnnnnnnnnnnnnnnnnnnnnnnnnnnnnnnnnnnnnnnnnnnnnnnnnnnnnnnnnnnnnnnnnnnnnnnnnnnnnnnnnnnnnnnnnnnnnnnnnnnnnnnnnnnnnnnnnnnnnnnnnnnnnnnnnnnnnnnnnnnnnnnnnnnnnnnnnnnnnnnnnnnnnnnnnnnnnnnnnnnnnnnnnnnnnnnnnnnnnnnnnnnnnnnnnnnnnnnnnnnnnnnnnnnnnnnnnnnnnnnnnnnnnnnnnnnnnnnnnnnnnnnnnnnnnnnnnnnnnnnnnnnnnnnnnnnnnnnnnnnnnnnnnnnnnnnnnnnnnnnnnnnnnnnnnnnnnnnnnnnnggacuaguguccaccugucccuccugggcugcuggauugucucguuuuccugccaaauaaacaggaucagcgcuuuacagaucuaaaaaaaaaaaaaaaaaaaaaaaaaaaaaaaaaaaaaaaaaaaaaaaaaaaaaaaaaaaaaaaaugcaucccccccccccccccccccccccccccccccaaaggcucuuuucagagccaccagaauu

SEQ ID NO: 187 - RNA, 1870 nt, Artificial Sequence
  mRNA product Ndufa4_RAV-G(GC)_PSMB3_A64-C30-histoneSL
gggagaguccgcucagccagguugcagaagcggcuuagcguguguccuaaucuucucucugcguguagguaggccugugccgcaaacaagcuuaccauggugccccaggcccuccuguucgucccgcugcugguguucccccucugcuucggcaaguuccccaucuacaccauccccgacaagcuggggccguggagccccaucgacauccaccaccuguccugccccaacaaccucguggucgaggacgagggcugcaccaaccugagcggguucuccuacauggagcugaaggugggcuacaucagcgccaucaagaugaacggguucacgugcaccggcguggucaccgaggcggagaccuacacgaacuucgugggcuacgugaccaccaccuucaagcggaagcacuuccgccccacgccggacgccugccgggccgccuacaacuggaagauggccggggacccccgcuacgaggagucccuccacaaccccuaccccgacuaccacuggcugcggaccgucaagaccaccaaggagagccuggugaucaucuccccgagcguggcggaccucgaccccuacgaccgcucccugcacagccgggucuuccccggcgggaacugcuccggcguggccgugagcuccacguacugcagcaccaaccacgacuacaccaucuggaugcccgagaacccgcgccuggggauguccugcgacaucuucaccaacagccggggcaagcgcgccuccaagggcagcgagacgugcggguucgucgacgagcggggccucuacaagucccugaagggggccugcaagcugaagcucugcggcgugcugggccugcgccucauggacgggaccuggguggcgaugcagaccagcaacgagaccaaguggugcccccccggccagcuggucaaccugcacgacuuccggagcgacgagaucgagcaccucgugguggaggagcuggucaagaagcgcgaggagugccuggacgcccucgaguccaucaugacgaccaagagcguguccuuccggcgccugagccaccuccggaagcuggugcccggguucggcaaggccuacaccaucuucaacaagacccugauggaggccgacgcccacuacaaguccguccgcacguggaacgagaucaucccgagcaaggggugccugcgggugggcggccgcugccacccccacgucaacgggguguucuucaacggcaucauccucgggcccgacggcaacgugcugauccccgagaugcaguccagccugcuccagcagcacauggagcugcuggucuccagcgugaucccgcucaugcacccccuggcggaccccuccaccguguucaagaacggggacgaggccgaggacuucgucgaggugcaccuccccgacgugcacgagcggaucagcggcgucgaccugggccugccgaacugggggaaguacgugcugcucuccgccggcgcccugaccgcccugaugcugaucaucuuccucaugaccugcuggcgccgggugaaccggagcgagcccacgcagcacaaccugcgcgggaccggccgggaggucuccgugaccccgcagagcgggaagaucaucuccagcugggaguccuacaagagcggcggcgagaccgggcugugaggacuagucccuguucccagagcccacuuuuuuuucuuuuuuugaaauaaaauagccugucuuucagaucuaaaaaaaaaaaaaaaaaaaaaaaaaaaaaaaaaaaaaaaaaaaaaaaaaaaaaaaaaaaaaaaaugcaucccccccccccccccccccccccccccccccaaaggcucuuuucagagccaccagaauu

SEQ ID NO: 188 - RNA, 1811 nt, Artificial Sequence
  mRNA product Ndufa4_RAV-G(GC)_PSMB3_A64
gggagaguccgcucagccagguugcagaagcggcuuagcguguguccuaaucuucucucugcguguagguaggccugugccgcaaacaagcuuaccauggugccccaggcccuccuguucgucccgcugcugguguucccccucugcuucggcaaguuccccaucuacaccauccccgacaagcuggggccguggagccccaucgacauccaccaccuguccugccccaacaaccucguggucgaggacgagggcugcaccaaccugagcggguucuccuacauggagcugaaggugggcuacaucagcgccaucaagaugaacggguucacgugcaccggcguggucaccgaggcggagaccuacacgaacuucgugggcuacgugaccaccaccuucaagcggaagcacuuccgccccacgccggacgccugccgggccgccuacaacuggaagauggccggggacccccgcuacgaggagucccuccacaaccccuaccccgacuaccacuggcugcggaccgucaagaccaccaaggagagccuggugaucaucuccccgagcguggcggaccucgaccccuacgaccgcucccugcacagccgggucuuccccggcgggaacugcuccggcguggccgugagcuccacguacugcagcaccaaccacgacuacaccaucuggaugcccgagaacccgcgccuggggauguccugcgacaucuucaccaacagccggggcaagcgcgccuccaagggcagcgagacgugcggguucgucgacgagcggggccucuacaagucccugaagggggccugcaagcugaagcucugcggcgugcugggccugcgccucauggacgggaccuggguggcgaugcagaccagcaacgagaccaaguggugcccccccggccagcuggucaaccugcacgacuuccggagcgacgagaucgagcaccucgugguggaggagcuggucaagaagcgcgaggagugccuggacgcccucgaguccaucaugacgaccaagagcguguccuuccggcgccugagccaccuccggaagcuggugcccggguucggcaaggccuacaccaucuucaacaagacccugauggaggccgacgcccacuacaaguccguccgcacguggaacgagaucaucccgagcaaggggugccugcgggugggcggccgcugccacccccacgucaacgggguguucuucaacggcaucauccucgggcccgacggcaacgugcugauccccgagaugcaguccagccugcuccagcagcacauggagcugcuggucuccagcgugaucccgcucaugcacccccuggcggaccccuccaccguguucaagaacggggacgaggccgaggacuucgucgaggugcaccuccccgacgugcacgagcggaucagcggcgucgaccugggccugccgaacugggggaaguacgugcugcucuccgccggcgcccugaccgcccugaugcugaucaucuuccucaugaccugcuggcgccgggugaaccggagcgagcccacgcagcacaaccugcgcgggaccggccgggaggucuccgugaccccgcagagcgggaagaucaucuccagcugggaguccuacaagagcggcggcgagaccgggcugugaggacuagucccuguucccagagcccacuuuuuuuucuuuuuuugaaauaaaauagccugucuuucagaucuaaaaaaaaaaaaaaaaaaaaaaaaaaaaaaaaaaaaaaaaaaaaaaaaaaaaaaaaaaaaaaaagaauu

SEQ ID NO: 189 - RNA, 877 nt, Artificial Sequence
  mRNA product Ndufa4_HsEPO(GC)_PSMB3_A64-C30-histoneSL
gggagaguccgcucagccagguugcagaagcggcuuagcguguguccuaaucuucucucugcguguagguaggccugugccgcaaacaagcuuaccaugggcgugcacgagugccccgccuggcuguggcuccugcugagccuccugucccugccgcucgggcugcccguccugggcgcccccccgcggcucaucugcgacagccgcgugcuggagcgguaccugcucgaggcgaaggaggccgagaacaucaccaccgggugcgccgagcacugcucccugaacgagaacaucacggugccggacaccaaggucaacuucuacgccuggaagcgcauggaggugggccagcaggccguggaggucuggcaggggcuggcgcuccugagcgaggccgugcugcggggccaggcccuccuggugaacuccagccagcccugggagccccugcagcuccacgucgacaaggccguguccggccugcgcagccugaccacccuccugcgggcgcugggggcccagaaggaggccaucucccccccggacgccgccagcgcggccccgcuccgcacgaucaccgccgacaccuuccggaagcuguuccgcguguacuccaacuuccugcggggcaagcucaagcuguacaccggggaggccugccgcacgggcgaccggugaggacuagucccuguucccagagcccacuuuuuuuucuuuuuuugaaauaaaauagccugucuuucagaucuaaaaaaaaaaaaaaaaaaaaaaaaaaaaaaaaaaaaaaaaaaaaaaaaaaaaaaaaaaaaaaaaugcaucccccccccccccccccccccccccccccccaaaggcucuuuucagagccaccagaauu

SEQ ID NO: 190 - RNA, 818 nt, Artificial Sequence
  mRNA product Ndufa4_HsEPO(GC)_PSMB3_A64
gggagaguccgcucagccagguugcagaagcggcuuagcguguguccuaaucuucucucugcguguagguaggccugugccgcaaacaagcuuaccaugggcgugcacgagugccccgccuggcuguggcuccugcugagccuccugucccugccgcucgggcugcccguccugggcgcccccccgcggcucaucugcgacagccgcgugcuggagcgguaccugcucgaggcgaaggaggccgagaacaucaccaccgggugcgccgagcacugcucccugaacgagaacaucacggugccggacaccaaggucaacuucuacgccuggaagcgcauggaggugggccagcaggccguggaggucuggcaggggcuggcgcuccugagcgaggccgugcugcggggccaggcccuccuggugaacuccagccagcccugggagccccugcagcuccacgucgacaaggccguguccggccugcgcagccugaccacccuccugcgggcgcugggggcccagaaggaggccaucucccccccggacgccgccagcgcggccccgcuccgcacgaucaccgccgacaccuuccggaagcuguuccgcguguacuccaacuuccugcggggcaagcucaagcuguacaccggggaggccugccgcacgggcgaccggugaggacuagucccuguucccagagcccacuuuuuuuucuuuuuuugaaauaaaauagccugucuuucagaucuaaaaaaaaaaaaaaaaaaaaaaaaaaaaaaaaaaaaaaaaaaaaaaaaaaaaaaaaaaaaaaaagaauu

SEQ ID NO: 191 - RNA, 1948 nt, Artificial Sequence
  mRNA product Ndufa4_PpLuc(GC)_PSMB3_A64-C30-histoneSL
gggagaguccgcucagccagguugcagaagcggcuuagcguguguccuaaucuucucucugcguguagguaggccugugccgcaaacaagcuuaccauggaggacgccaagaacaucaagaagggcccggcgcccuucuacccgcuggaggacgggaccgccggcgagcagcuccacaaggccaugaagcgguacgcccuggugccgggcacgaucgccuucaccgacgcccacaucgaggucgacaucaccuacgcggaguacuucgagaugagcgugcgccuggccgaggccaugaagcgguacggccugaacaccaaccaccggaucguggugugcucggagaacagccugcaguucuucaugccggugcugggcgcccucuucaucggcguggccgucgccccggcgaacgacaucuacaacgagcgggagcugcugaacagcauggggaucagccagccgaccgugguguucgugagcaagaagggccugcagaagauccugaacgugcagaagaagcugcccaucauccagaagaucaucaucauggacagcaagaccgacuaccagggcuuccagucgauguacacguucgugaccagccaccucccgccgggcuucaacgaguacgacuucgucccggagagcuucgaccgggacaagaccaucgcccugaucaugaacagcagcggcagcaccggccugccgaaggggguggcccugccgcaccggaccgccugcgugcgcuucucgcacgcccgggaccccaucuucggcaaccagaucaucccggacaccgccauccugagcguggugccguuccaccacggcuucggcauguucacgacccugggcuaccucaucugcggcuuccgggugguccugauguaccgguucgaggaggagcuguuccugcggagccugcaggacuacaagauccagagcgcgcugcucgugccgacccuguucagcuucuucgccaagagcacccugaucgacaaguacgaccugucgaaccugcacgagaucgccagcgggggcgccccgcugagcaaggaggugggcgaggccguggccaagcgguuccaccucccgggcauccgccagggcuacggccugaccgagaccacgagcgcgauccugaucacccccgagggggacgacaagccgggcgccgugggcaagguggucccguucuucgaggccaaggugguggaccuggacaccggcaagacccugggcgugaaccagcggggcgagcugugcgugcgggggccgaugaucaugagcggcuacgugaacaacccggaggccaccaacgcccucaucgacaaggacggcuggcugcacagcggcgacaucgccuacugggacgaggacgagcacuucuucaucgucgaccggcugaagucgcugaucaaguacaagggcuaccagguggcgccggccgagcuggagagcauccugcuccagcaccccaacaucuucgacgccggcguggccgggcugccggacgacgacgccggcgagcugccggccgcggugguggugcuggagcacggcaagaccaugacggagaaggagaucgucgacuacguggccagccaggugaccaccgccaagaagcugcggggcggcgugguguucguggacgaggucccgaagggccugaccgggaagcucgacgcccggaagauccgcgagauccugaucaaggccaagaagggcggcaagaucgccgugugaggacuagucccuguucccagagcccacuuuuuuuucuuuuuuugaaauaaaauagccugucuuucagaucuaaaaaaaaaaaaaaaaaaaaaaaaaaaaaaaaaaaaaaaaaaaaaaaaaaaaaaaaaaaaaaaaugcaucccccccccccccccccccccccccccccccaaaggcucuuuucagagccaccagaauu

SEQ ID NO: 192 - RNA, 1889 nt, Artificial Sequence
  mRNA product Ndufa4_PpLuc(GC)_PSMB3_A64
gggagaguccgcucagccagguugcagaagcggcuuagcguguguccuaaucuucucucugcguguagguaggccugugccgcaaacaagcuuaccauggaggacgccaagaacaucaagaagggcccggcgcccuucuacccgcuggaggacgggaccgccggcgagcagcuccacaaggccaugaagcgguacgcccuggugccgggcacgaucgccuucaccgacgcccacaucgaggucgacaucaccuacgcggaguacuucgagaugagcgugcgccuggccgaggccaugaagcgguacggccugaacaccaaccaccggaucguggugugcucggagaacagccugcaguucuucaugccggugcugggcgcccucuucaucggcguggccgucgccccggcgaacgacaucuacaacgagcgggagcugcugaacagcauggggaucagccagccgaccgugguguucgugagcaagaagggccugcagaagauccugaacgugcagaagaagcugcccaucauccagaagaucaucaucauggacagcaagaccgacuaccagggcuuccagucgauguacacguucgugaccagccaccucccgccgggcuucaacgaguacgacuucgucccggagagcuucgaccgggacaagaccaucgcccugaucaugaacagcagcggcagcaccggccugccgaaggggguggcccugccgcaccggaccgccugcgugcgcuucucgcacgcccgggaccccaucuucggcaaccagaucaucccggacaccgccauccugagcguggugccguuccaccacggcuucggcauguucacgacccugggcuaccucaucugcggcuuccgggugguccugauguaccgguucgaggaggagcuguuccugcggagccugcaggacuacaagauccagagcgcgcugcucgugccgacccuguucagcuucuucgccaagagcacccugaucgacaaguacgaccugucgaaccugcacgagaucgccagcgggggcgccccgcugagcaaggaggugggcgaggccguggccaagcgguuccaccucccgggcauccgccagggcuacggccugaccgagaccacgagcgcgauccugaucacccccgagggggacgacaagccgggcgccgugggcaagguggucccguucuucgaggccaaggugguggaccuggacaccggcaagacccugggcgugaaccagcggggcgagcugugcgugcgggggccgaugaucaugagcggcuacgugaacaacccggaggccaccaacgcccucaucgacaaggacggcuggcugcacagcggcgacaucgccuacugggacgaggacgagcacuucuucaucgucgaccggcugaagucgcugaucaaguacaagggcuaccagguggcgccggccgagcuggagagcauccugcuccagcaccccaacaucuucgacgccggcguggccgggcugccggacgacgacgccggcgagcugccggccgcggugguggugcuggagcacggcaagaccaugacggagaaggagaucgucgacuacguggccagccaggugaccaccgccaagaagcugcggggcggcgugguguucguggacgaggucccgaagggccugaccgggaagcucgacgcccggaagauccgcgagauccugaucaaggccaagaagggcggcaagaucgccgugugaggacuagucccuguucccagagcccacuuuuuuuucuuuuuuugaaauaaaauagccugucuuucagaucuaaaaaaaaaaaaaaaaaaaaaaaaaaaaaaaaaaaaaaaaaaaaaaaaaaaaaaaaaaaaaaaagaauu

SEQ ID NO: 193 - RNA, 1957 nt, Artificial Sequence
  mRNA product Ndufa4_protein of interest example 5_PSMB3_A64-C30-histoneSL
  misc_feature (97)..(1758): n is a, c, g, or u
gggagaguccgcucagccagguugcagaagcggcuuagcguguguccuaaucuucucucugcguguagguaggccugugccgcaaacaagcuuaccnnnnnnnnnnnnnnnnnnnnnnnnnnnnnnnnnnnnnnnnnnnnnnnnnnnnnnnnnnnnnnnnnnnnnnnnnnnnnnnnnnnnnnnnnnnnnnnnnnnnnnnnnnnnnnnnnnnnnnnnnnnnnnnnnnnnnnnnnnnnnnnnnnnnnnnnnnnnnnnnnnnnnnnnnnnnnnnnnnnnnnnnnnnnnnnnnnnnnnnnnnnnnnnnnnnnnnnnnnnnnnnnnnnnnnnnnnnnnnnnnnnnnnnnnnnnnnnnnnnnnnnnnnnnnnnnnnnnnnnnnnnnnnnnnnnnnnnnnnnnnnnnnnnnnnnnnnnnnnnnnnnnnnnnnnnnnnnnnnnnnnnnnnnnnnnnnnnnnnnnnnnnnnnnnnnnnnnnnnnnnnnnnnnnnnnnnnnnnnnnnnnnnnnnnnnnnnnnnnnnnnnnnnnnnnnnnnnnnnnnnnnnnnnnnnnnnnnnnnnnnnnnnnnnnnnnnnnnnnnnnnnnnnnnnnnnnnnnnnnnnnnnnnnnnnnnnnnnnnnnnnnnnnnnnnnnnnnnnnnnnnnnnnnnnnnnnnnnnnnnnnnnnnnnnnnnnnnnnnnnnnnnnnnnnnnnnnnnnnnnnnnnnnnnnnnnnnnnnnnnnnnnnnnnnnnnnnnnnnnnnnnnnnnnnnnnnnnnnnnnnnnnnnnnnnnnnnnnnnnnnnnnnnnnnnnnnnnnnnnnnnnnnnnnnnnnnnnnnnnnnnnnnnnnnnnnnnnnnnnnnnnnnnnnnnnnnnnnnnnnnnnnnnnnnnnnnnnnnnnnnnnnnnnnnnnnnnnnnnnnnnnnnnnnnnnnnnnnnnnnnnnnnnnnnnnnnnnnnnnnnnnnnnnnnnnnnnnnnnnnnnnnnnnnnnnnnnnnnnnnnnnnnnnnnnnnnnnnnnnnnnnnnnnnnnnnnnnnnnnnnnnnnnnnnnnnnnnnnnnnnnnnnnnnnnnnnnnnnnnnnnnnnnnnnnnnnnnnnnnnnnnnnnnnnnnnnnnnnnnnnnnnnnnnnnnnnnnnnnnnnnnnnnnnnnnnnnnnnnnnnnnnnnnnnnnnnnnnnnnnnnnnnnnnnnnnnnnnnnnnnnnnnnnnnnnnnnnnnnnnnnnnnnnnnnnnnnnnnnnnnnnnnnnnnnnnnnnnnnnnnnnnnnnnnnnnnnnnnnnnnnnnnnnnnnnnnnnnnnnnnnnnnnnnnnnnnnnnnnnnnnnnnnnnnnnnnnnnnnnnnnnnnnnnnnnnnnnnnnnnnnnnnnnnnnnnnnnnnnnnnnnnnnnnnnnnnnnnnnnnnnnnnnnnnnnnnnnnnnnnnnnnnnnnnnnnnnnnnnnnnnnnnnnnnnnnnnnnnnnnnnnnnnnnnnnnnnnnnnnnnnnnnnnnnnnnnnnnnnnnnnnnnnnnnnnnnnnnnnnnnnnnnnnnnnnnnnnnnnnnnnnnnnnnnnnnnnnnnnnnnnnnnnnnnnnnnnnnnnnnnnnnnnnnnnnnnnnnnnnnnnnnnnnnnnnnnnnnnnnnnnnnnnnnnnnnnnnnnnnnnnnnnnnnnnnnnnnnnnnnnnnnnnnnnnnnnnnnnnnnnnnnnnnnnnnnnnnnnnnnnnnnnnnnnnnnnnnnnnnnnnnnnnnnnnnnnnnnnnnnnnnnnnnnnnnnnnnnnnnnnnnnnnnnnnnnnnnnnnnnnnggacuagucccuguucccagagcccacuuuuuuuucuuuuuuugaaauaaaauagccugucuuucagaucuaaaaaaaaaaaaaaaaaaaaaaaaaaaaaaaaaaaaaaaaaaaaaaaaaaaaaaaaaaaaaaaaugcaucccccccccccccccccccccccccccccccaaaggcucuuuucagagccaccagaauu

SEQ ID NO: 194 - RNA, 1934 nt, Artificial Sequence
  mRNA product Ndufa4_RAV-G(GC)_CASP1_A64-C30-histoneSL
gggagaguccgcucagccagguugcagaagcggcuuagcguguguccuaaucuucucucugcguguagguaggccugugccgcaaacaagcuuaccauggugccccaggcccuccuguucgucccgcugcugguguucccccucugcuucggcaaguuccccaucuacaccauccccgacaagcuggggccguggagccccaucgacauccaccaccuguccugccccaacaaccucguggucgaggacgagggcugcaccaaccugagcggguucuccuacauggagcugaaggugggcuacaucagcgccaucaagaugaacggguucacgugcaccggcguggucaccgaggcggagaccuacacgaacuucgugggcuacgugaccaccaccuucaagcggaagcacuuccgccccacgccggacgccugccgggccgccuacaacuggaagauggccggggacccccgcuacgaggagucccuccacaaccccuaccccgacuaccacuggcugcggaccgucaagaccaccaaggagagccuggugaucaucuccccgagcguggcggaccucgaccccuacgaccgcucccugcacagccgggucuuccccggcgggaacugcuccggcguggccgugagcuccacguacugcagcaccaaccacgacuacaccaucuggaugcccgagaacccgcgccuggggauguccugcgacaucuucaccaacagccggggcaagcgcgccuccaagggcagcgagacgugcggguucgucgacgagcggggccucuacaagucccugaagggggccugcaagcugaagcucugcggcgugcugggccugcgccucauggacgggaccuggguggcgaugcagaccagcaacgagaccaaguggugcccccccggccagcuggucaaccugcacgacuuccggagcgacgagaucgagcaccucgugguggaggagcuggucaagaagcgcgaggagugccuggacgcccucgaguccaucaugacgaccaagagcguguccuuccggcgccugagccaccuccggaagcuggugcccggguucggcaaggccuacaccaucuucaacaagacccugauggaggccgacgcccacuacaaguccguccgcacguggaacgagaucaucccgagcaaggggugccugcgggugggcggccgcugccacccccacgucaacgggguguucuucaacggcaucauccucgggcccgacggcaacgugcugauccccgagaugcaguccagccugcuccagcagcacauggagcugcuggucuccagcgugaucccgcucaugcacccccuggcggaccccuccaccguguucaagaacggggacgaggccgaggacuucgucgaggugcaccuccccgacgugcacgagcggaucagcggcgucgaccugggccugccgaacugggggaaguacgugcugcucuccgccggcgcccugaccgcccugaugcugaucaucuuccucaugaccugcuggcgccgggugaaccggagcgagcccacgcagcacaaccugcgcgggaccggccgggaggucuccgugaccccgcagagcgggaagaucaucuccagcugggaguccuacaagagcggcggcgagaccgggcugugaggacuaguaauaaggaaacuguaugaaugucugugggcaggaagugaagagauccuucuguaaagguuuuuggaauuaugucugcugaauaauaaacuuuuuugaaauaauaaaucugguagaaaaaugagaucuaaaaaaaaaaaaaaaaaaaaaaaaaaaaaaaaaaaaaaaaaaaaaaaaaaaaaaaaaaaaaaaaugcaucccccccccccccccccccccccccccccccaaaggcucuuuucagagccaccagaauu

SEQ ID NO: 195 - RNA, 1875 nt, Artificial Sequence
  mRNA product Ndufa4_RAV-G(GC)_CASP1_A64
gggagaguccgcucagccagguugcagaagcggcuuagcguguguccuaaucuucucucugcguguagguaggccugugccgcaaacaagcuuaccauggugccccaggcccuccuguucgucccgcugcugguguucccccucugcuucggcaaguuccccaucuacaccauccccgacaagcuggggccguggagccccaucgacauccaccaccuguccugccccaacaaccucguggucgaggacgagggcugcaccaaccugagcggguucuccuacauggagcugaaggugggcuacaucagcgccaucaagaugaacggguucacgugcaccggcguggucaccgaggcggagaccuacacgaacuucgugggcuacgugaccaccaccuucaagcggaagcacuuccgccccacgccggacgccugccgggccgccuacaacuggaagauggccggggacccccgcuacgaggagucccuccacaaccccuaccccgacuaccacuggcugcggaccgucaagaccaccaaggagagccuggugaucaucuccccgagcguggcggaccucgaccccuacgaccgcucccugcacagccgggucuuccccggcgggaacugcuccggcguggccgugagcuccacguacugcagcaccaaccacgacuacaccaucuggaugcccgagaacccgcgccuggggauguccugcgacaucuucaccaacagccggggcaagcgcgccuccaagggcagcgagacgugcggguucgucgacgagcggggccucuacaagucccugaagggggccugcaagcugaagcucugcggcgugcugggccugcgccucauggacgggaccuggguggcgaugcagaccagcaacgagaccaaguggugcccccccggccagcuggucaaccugcacgacuuccggagcgacgagaucgagcaccucgugguggaggagcuggucaagaagcgcgaggagugccuggacgcccucgaguccaucaugacgaccaagagcguguccuuccggcgccugagccaccuccggaagcuggugcccggguucggcaaggccuacaccaucuucaacaagacccugauggaggccgacgcccacuacaaguccguccgcacguggaacgagaucaucccgagcaaggggugccugcgggugggcggccgcugccacccccacgucaacgggguguucuucaacggcaucauccucgggcccgacggcaacgugcugauccccgagaugcaguccagccugcuccagcagcacauggagcugcuggucuccagcgugaucccgcucaugcacccccuggcggaccccuccaccguguucaagaacggggacgaggccgaggacuucgucgaggugcaccuccccgacgugcacgagcggaucagcggcgucgaccugggccugccgaacugggggaaguacgugcugcucuccgccggcgcccugaccgcccugaugcugaucaucuuccucaugaccugcuggcgccgggugaaccggagcgagcccacgcagcacaaccugcgcgggaccggccgggaggucuccgugaccccgcagagcgggaagaucaucuccagcugggaguccuacaagagcggcggcgagaccgggcugugaggacuaguaauaaggaaacuguaugaaugucugugggcaggaagugaagagauccuucuguaaagguuuuuggaauuaugucugcugaauaauaaacuuuuuugaaauaauaaaucugguagaaaaaugagaucuaaaaaaaaaaaaaaaaaaaaaaaaaaaaaaaaaaaaaaaaaaaaaaaaaaaaaaaaaaaaaaaagaauu

SEQ ID NO: 196 - RNA, 941 nt, Artificial Sequence
  mRNA product Ndufa4_HsEPO(GC)_CASP1_A64-C30-histoneSL
gggagaguccgcucagccagguugcagaagcggcuuagcguguguccuaaucuucucucugcguguagguaggccugugccgcaaacaagcuuaccaugggcgugcacgagugccccgccuggcuguggcuccugcugagccuccugucccugccgcucgggcugcccguccugggcgcccccccgcggcucaucugcgacagccgcgugcuggagcgguaccugcucgaggcgaaggaggccgagaacaucaccaccgggugcgccgagcacugcucccugaacgagaacaucacggugccggacaccaaggucaacuucuacgccuggaagcgcauggaggugggccagcaggccguggaggucuggcaggggcuggcgcuccugagcgaggccgugcugcggggccaggcccuccuggugaacuccagccagcccugggagccccugcagcuccacgucgacaaggccguguccggccugcgcagccugaccacccuccugcgggcgcugggggcccagaaggaggccaucucccccccggacgccgccagcgcggccccgcuccgcacgaucaccgccgacaccuuccggaagcuguuccgcguguacuccaacuuccugcggggcaagcucaagcuguacaccggggaggccugccgcacgggcgaccggugaggacuaguaauaaggaaacuguaugaaugucugugggcaggaagugaagagauccuucuguaaagguuuuuggaauuaugucugcugaauaauaaacuuuuuugaaauaauaaaucugguagaaaaaugagaucuaaaaaaaaaaaaaaaaaaaaaaaaaaaaaaaaaaaaaaaaaaaaaaaaaaaaaaaaaaaaaaaaugcaucccccccccccccccccccccccccccccccaaaggcucuuuucagagccaccagaauu

SEQ ID NO: 197 - RNA, 882 nt, Artificial Sequence
  mRNA product Ndufa4_HsEPO(GC)_CASP1_A64
gggagaguccgcucagccagguugcagaagcggcuuagcguguguccuaaucuucucucugcguguagguaggccugugccgcaaacaagcuuaccaugggcgugcacgagugccccgccuggcuguggcuccugcugagccuccugucccugccgcucgggcugcccguccugggcgcccccccgcggcucaucugcgacagccgcgugcuggagcgguaccugcucgaggcgaaggaggccgagaacaucaccaccgggugcgccgagcacugcucccugaacgagaacaucacggugccggacaccaaggucaacuucuacgccuggaagcgcauggaggugggccagcaggccguggaggucuggcaggggcuggcgcuccugagcgaggccgugcugcggggccaggcccuccuggugaacuccagccagcccugggagccccugcagcuccacgucgacaaggccguguccggccugcgcagccugaccacccuccugcgggcgcugggggcccagaaggaggccaucucccccccggacgccgccagcgcggccccgcuccgcacgaucaccgccgacaccuuccggaagcuguuccgcguguacuccaacuuccugcggggcaagcucaagcuguacaccggggaggccugccgcacgggcgaccggugaggacuaguaauaaggaaacuguaugaaugucugugggcaggaagugaagagauccuucuguaaagguuuuuggaauuaugucugcugaauaauaaacuuuuuugaaauaauaaaucugguagaaaaaugagaucuaaaaaaaaaaaaaaaaaaaaaaaaaaaaaaaaaaaaaaaaaaaaaaaaaaaaaaaaaaaaaaaagaauu

SEQ ID NO: 198 - RNA, 2012 nt, Artificial Sequence
  mRNA product Ndufa4_PpLuc(GC)_CASP1_A64-C30-histoneSL
gggagaguccgcucagccagguugcagaagcggcuuagcguguguccuaaucuucucucugcguguagguaggccugugccgcaaacaagcuuaccauggaggacgccaagaacaucaagaagggcccggcgcccuucuacccgcuggaggacgggaccgccggcgagcagcuccacaaggccaugaagcgguacgcccuggugccgggcacgaucgccuucaccgacgcccacaucgaggucgacaucaccuacgcggaguacuucgagaugagcgugcgccuggccgaggccaugaagcgguacggccugaacaccaaccaccggaucguggugugcucggagaacagccugcaguucuucaugccggugcugggcgcccucuucaucggcguggccgucgccccggcgaacgacaucuacaacgagcgggagcugcugaacagcauggggaucagccagccgaccgugguguucgugagcaagaagggccugcagaagauccugaacgugcagaagaagcugcccaucauccagaagaucaucaucauggacagcaagaccgacuaccagggcuuccagucgauguacacguucgugaccagccaccucccgccgggcuucaacgaguacgacuucgucccggagagcuucgaccgggacaagaccaucgcccugaucaugaacagcagcggcagcaccggccugccgaaggggguggcccugccgcaccggaccgccugcgugcgcuucucgcacgcccgggaccccaucuucggcaaccagaucaucccggacaccgccauccugagcguggugccguuccaccacggcuucggcauguucacgacccugggcuaccucaucugcggcuuccgggugguccugauguaccgguucgaggaggagcuguuccugcggagccugcaggacuacaagauccagagcgcgcugcucgugccgacccuguucagcuucuucgccaagagcacccugaucgacaaguacgaccugucgaaccugcacgagaucgccagcgggggcgccccgcugagcaaggaggugggcgaggccguggccaagcgguuccaccucccgggcauccgccagggcuacggccugaccgagaccacgagcgcgauccugaucacccccgagggggacgacaagccgggcgccgugggcaagguggucccguucuucgaggccaaggugguggaccuggacaccggcaagacccugggcgugaaccagcggggcgagcugugcgugcgggggccgaugaucaugagcggcuacgugaacaacccggaggccaccaacgcccucaucgacaaggacggcuggcugcacagcggcgacaucgccuacugggacgaggacgagcacuucuucaucgucgaccggcugaagucgcugaucaaguacaagggcuaccagguggcgccggccgagcuggagagcauccugcuccagcaccccaacaucuucgacgccggcguggccgggcugccggacgacgacgccggcgagcugccggccgcggugguggugcuggagcacggcaagaccaugacggagaaggagaucgucgacuacguggccagccaggugaccaccgccaagaagcugcggggcggcgugguguucguggacgaggucccgaagggccugaccgggaagcucgacgcccggaagauccgcgagauccugaucaaggccaagaagggcggcaagaucgccgugugaggacuaguaauaaggaaacuguaugaaugucugugggcaggaagugaagagauccuucuguaaagguuuuuggaauuaugucugcugaauaauaaacuuuuuugaaauaauaaaucugguagaaaaaugagaucuaaaaaaaaaaaaaaaaaaaaaaaaaaaaaaaaaaaaaaaaaaaaaaaaaaaaaaaaaaaaaaaaugcaucccccccccccccccccccccccccccccccaaaggcucuuuucagagccaccagaauu

SEQ ID NO: 199 - RNA, 1953 nt, Artificial Sequence
  mRNA product Ndufa4_PpLuc(GC)_CASP1_A64
gggagaguccgcucagccagguugcagaagcggcuuagcguguguccuaaucuucucucugcguguagguaggccugugccgcaaacaagcuuaccauggaggacgccaagaacaucaagaagggcccggcgcccuucuacccgcuggaggacgggaccgccggcgagcagcuccacaaggccaugaagcgguacgcccuggugccgggcacgaucgccuucaccgacgcccacaucgaggucgacaucaccuacgcggaguacuucgagaugagcgugcgccuggccgaggccaugaagcgguacggccugaacaccaaccaccggaucguggugugcucggagaacagccugcaguucuucaugccggugcugggcgcccucuucaucggcguggccgucgccccggcgaacgacaucuacaacgagcgggagcugcugaacagcauggggaucagccagccgaccgugguguucgugagcaagaagggccugcagaagauccugaacgugcagaagaagcugcccaucauccagaagaucaucaucauggacagcaagaccgacuaccagggcuuccagucgauguacacguucgugaccagccaccucccgccgggcuucaacgaguacgacuucgucccggagagcuucgaccgggacaagaccaucgcccugaucaugaacagcagcggcagcaccggccugccgaaggggguggcccugccgcaccggaccgccugcgugcgcuucucgcacgcccgggaccccaucuucggcaaccagaucaucccggacaccgccauccugagcguggugccguuccaccacggcuucggcauguucacgacccugggcuaccucaucugcggcuuccgggugguccugauguaccgguucgaggaggagcuguuccugcggagccugcaggacuacaagauccagagcgcgcugcucgugccgacccuguucagcuucuucgccaagagcacccugaucgacaaguacgaccugucgaaccugcacgagaucgccagcgggggcgccccgcugagcaaggaggugggcgaggccguggccaagcgguuccaccucccgggcauccgccagggcuacggccugaccgagaccacgagcgcgauccugaucacccccgagggggacgacaagccgggcgccgugggcaagguggucccguucuucgaggccaaggugguggaccuggacaccggcaagacccugggcgugaaccagcggggcgagcugugcgugcgggggccgaugaucaugagcggcuacgugaacaacccggaggccaccaacgcccucaucgacaaggacggcuggcugcacagcggcgacaucgccuacugggacgaggacgagcacuucuucaucgucgaccggcugaagucgcugaucaaguacaagggcuaccagguggcgccggccgagcuggagagcauccugcuccagcaccccaacaucuucgacgccggcguggccgggcugccggacgacgacgccggcgagcugccggccgcggugguggugcuggagcacggcaagaccaugacggagaaggagaucgucgacuacguggccagccaggugaccaccgccaagaagcugcggggcggcgugguguucguggacgaggucccgaagggccugaccgggaagcucgacgcccggaagauccgcgagauccugaucaaggccaagaagggcggcaagaucgccgugugaggacuaguaauaaggaaacuguaugaaugucugugggcaggaagugaagagauccuucuguaaagguuuuuggaauuaugucugcugaauaauaaacuuuuuugaaauaauaaaucugguagaaaaaugagaucuaaaaaaaaaaaaaaaaaaaaaaaaaaaaaaaaaaaaaaaaaaaaaaaaaaaaaaaaaaaaaaaagaauu

SEQ ID NO: 200 - RNA, 2021 nt, Artificial Sequence
  mRNA product Ndufa4_protein of interest example 5_CASP1_A64-C30-histoneSL
  misc_feature (97)..(1758): n is a, c, g, or u
gggagaguccgcucagccagguugcagaagcggcuuagcguguguccuaaucuucucucugcguguagguaggccugugccgcaaacaagcuuaccnnnnnnnnnnnnnnnnnnnnnnnnnnnnnnnnnnnnnnnnnnnnnnnnnnnnnnnnnnnnnnnnnnnnnnnnnnnnnnnnnnnnnnnnnnnnnnnnnnnnnnnnnnnnnnnnnnnnnnnnnnnnnnnnnnnnnnnnnnnnnnnnnnnnnnnnnnnnnnnnnnnnnnnnnnnnnnnnnnnnnnnnnnnnnnnnnnnnnnnnnnnnnnnnnnnnnnnnnnnnnnnnnnnnnnnnnnnnnnnnnnnnnnnnnnnnnnnnnnnnnnnnnnnnnnnnnnnnnnnnnnnnnnnnnnnnnnnnnnnnnnnnnnnnnnnnnnnnnnnnnnnnnnnnnnnnnnnnnnnnnnnnnnnnnnnnnnnnnnnnnnnnnnnnnnnnnnnnnnnnnnnnnnnnnnnnnnnnnnnnnnnnnnnnnnnnnnnnnnnnnnnnnnnnnnnnnnnnnnnnnnnnnnnnnnnnnnnnnnnnnnnnnnnnnnnnnnnnnnnnnnnnnnnnnnnnnnnnnnnnnnnnnnnnnnnnnnnnnnnnnnnnnnnnnnnnnnnnnnnnnnnnnnnnnnnnnnnnnnnnnnnnnnnnnnnnnnnnnnnnnnnnnnnnnnnnnnnnnnnnnnnnnnnnnnnnnnnnnnnnnnnnnnnnnnnnnnnnnnnnnnnnnnnnnnnnnnnnnnnnnnnnnnnnnnnnnnnnnnnnnnnnnnnnnnnnnnnnnnnnnnnnnnnnnnnnnnnnnnnnnnnnnnnnnnnnnnnnnnnnnnnnnnnnnnnnnnnnnnnnnnnnnnnnnnnnnnnnnnnnnnnnnnnnnnnnnnnnnnnnnnnnnnnnnnnnnnnnnnnnnnnnnnnnnnnnnnnnnnnnnnnnnnnnnnnnnnnnnnnnnnnnnnnnnnnnnnnnnnnnnnnnnnnnnnnnnnnnnnnnnnnnnnnnnnnnnnnnnnnnnnnnnnnnnnnnnnnnnnnnnnnnnnnnnnnnnnnnnnnnnnnnnnnnnnnnnnnnnnnnnnnnnnnnnnnnnnnnnnnnnnnnnnnnnnnnnnnnnnnnnnnnnnnnnnnnnnnnnnnnnnnnnnnnnnnnnnnnnnnnnnnnnnnnnnnnnnnnnnnnnnnnnnnnnnnnnnnnnnnnnnnnnnnnnnnnnnnnnnnnnnnnnnnnnnnnnnnnnnnnnnnnnnnnnnnnnnnnnnnnnnnnnnnnnnnnnnnnnnnnnnnnnnnnnnnnnnnnnnnnnnnnnnnnnnnnnnnnnnnnnnnnnnnnnnnnnnnnnnnnnnnnnnnnnnnnnnnnnnnnnnnnnnnnnnnnnnnnnnnnnnnnnnnnnnnnnnnnnnnnnnnnnnnnnnnnnnnnnnnnnnnnnnnnnnnnnnnnnnnnnnnnnnnnnnnnnnnnnnnnnnnnnnnnnnnnnnnnnnnnnnnnnnnnnnnnnnnnnnnnnnnnnnnnnnnnnnnnnnnnnnnnnnnnnnnnnnnnnnnnnnnnnnnnnnnnnnnnnnnnnnnnnnnnnnnnnnnnnnnnnnnnnnnnnnnnnnnnnnnnnnnnnnnnnnnnnnnnnnnnnnnnnnnnnnnnnnnnnnnnnnnnnnnnnnnnnnnnnnnnnnnnnnnnnnnnnnnnnnnnnnnnnnnnnnnnnnnnnnnnnnnnnnnnnnnnnnnnnnnnnnnnnnnnnnnnnnnnnnnnnnnnnnnnnnnnnnnnnnnnnnggacuaguaauaaggaaacuguaugaaugucugugggcaggaagugaagagauccuucuguaaagguuuuuggaauuaugucugcugaauaauaaacuuuuuugaaauaauaaaucugguagaaaaaugagaucuaaaaaaaaaaaaaaaaaaaaaaaaaaaaaaaaaaaaaaaaaaaaaaaaaaaaaaaaaaaaaaaaugcaucccccccccccccccccccccccccccccccaaaggcucuuuucagagccaccagaauu

SEQ ID NO: 201 - RNA, 1950 nt, Artificial Sequence
  mRNA product Ndufa4_RAV-G(GC)_COX6B1_A64-C30-histoneSL
gggagaguccgcucagccagguugcagaagcggcuuagcguguguccuaaucuucucucugcguguagguaggccugugccgcaaacaagcuuaccauggugccccaggcccuccuguucgucccgcugcugguguucccccucugcuucggcaaguuccccaucuacaccauccccgacaagcuggggccguggagccccaucgacauccaccaccuguccugccccaacaaccucguggucgaggacgagggcugcaccaaccugagcggguucuccuacauggagcugaaggugggcuacaucagcgccaucaagaugaacggguucacgugcaccggcguggucaccgaggcggagaccuacacgaacuucgugggcuacgugaccaccaccuucaagcggaagcacuuccgccccacgccggacgccugccgggccgccuacaacuggaagauggccggggacccccgcuacgaggagucccuccacaaccccuaccccgacuaccacuggcugcggaccgucaagaccaccaaggagagccuggugaucaucuccccgagcguggcggaccucgaccccuacgaccgcucccugcacagccgggucuuccccggcgggaacugcuccggcguggccgugagcuccacguacugcagcaccaaccacgacuacaccaucuggaugcccgagaacccgcgccuggggauguccugcgacaucuucaccaacagccggggcaagcgcgccuccaagggcagcgagacgugcggguucgucgacgagcggggccucuacaagucccugaagggggccugcaagcugaagcucugcggcgugcugggccugcgccucauggacgggaccuggguggcgaugcagaccagcaacgagaccaaguggugcccccccggccagcuggucaaccugcacgacuuccggagcgacgagaucgagcaccucgugguggaggagcuggucaagaagcgcgaggagugccuggacgcccucgaguccaucaugacgaccaagagcguguccuuccggcgccugagccaccuccggaagcuggugcccggguucggcaaggccuacaccaucuucaacaagacccugauggaggccgacgcccacuacaaguccguccgcacguggaacgagaucaucccgagcaaggggugccugcgggugggcggccgcugccacccccacgucaacgggguguucuucaacggcaucauccucgggcccgacggcaacgugcugauccccgagaugcaguccagccugcuccagcagcacauggagcugcuggucuccagcgugaucccgcucaugcacccccuggcggaccccuccaccguguucaagaacggggacgaggccgaggacuucgucgaggugcaccuccccgacgugcacgagcggaucagcggcgucgaccugggccugccgaacugggggaaguacgugcugcucuccgccggcgcccugaccgcccugaugcugaucaucuuccucaugaccugcuggcgccgggugaaccggagcgagcccacgcagcacaaccugcgcgggaccggccgggaggucuccgugaccccgcagagcgggaagaucaucuccagcugggaguccuacaagagcggcggcgagaccgggcugugaggacuaguacuggcugcaucucccuuuccucuguccuccauccuucucccaggauggugaagggggaccugguacccagugauccccaccccaggauccuaaaucaugacuuaccugcuaauaaaaacucauuggaaaagugagaagaucuaaaaaaaaaaaaaaaaaaaaaaaaaaaaaaaaaaaaaaaaaaaaaaaaaaaaaaaaaaaaaaaaugcaucccccccccccccccccccccccccccccccaaaggcucuuuucagagccaccagaauu

SEQ ID NO: 202 - RNA, 1891 nt, Artificial Sequence
  mRNA product Ndufa4_RAV-G(GC)_COX6B1_A64
gggagaguccgcucagccagguugcagaagcggcuuagcguguguccuaaucuucucucugcguguagguaggccugugccgcaaacaagcuuaccauggugccccaggcccuccuguucgucccgcugcugguguucccccucugcuucggcaaguuccccaucuacaccauccccgacaagcuggggccguggagccccaucgacauccaccaccuguccugccccaacaaccucguggucgaggacgagggcugcaccaaccugagcggguucuccuacauggagcugaaggugggcuacaucagcgccaucaagaugaacggguucacgugcaccggcguggucaccgaggcggagaccuacacgaacuucgugggcuacgugaccaccaccuucaagcggaagcacuuccgccccacgccggacgccugccgggccgccuacaacuggaagauggccggggacccccgcuacgaggagucccuccacaaccccuaccccgacuaccacuggcugcggaccgucaagaccaccaaggagagccuggugaucaucuccccgagcguggcggaccucgaccccuacgaccgcucccugcacagccgggucuuccccggcgggaacugcuccggcguggccgugagcuccacguacugcagcaccaaccacgacuacaccaucuggaugcccgagaacccgcgccuggggauguccugcgacaucuucaccaacagccggggcaagcgcgccuccaagggcagcgagacgugcggguucgucgacgagcggggccucuacaagucccugaagggggccugcaagcugaagcucugcggcgugcugggccugcgccucauggacgggaccuggguggcgaugcagaccagcaacgagaccaaguggugcccccccggccagcuggucaaccugcacgacuuccggagcgacgagaucgagcaccucgugguggaggagcuggucaagaagcgcgaggagugccuggacgcccucgaguccaucaugacgaccaagagcguguccuuccggcgccugagccaccuccggaagcuggugcccggguucggcaaggccuacaccaucuucaacaagacccugauggaggccgacgcccacuacaaguccguccgcacguggaacgagaucaucccgagcaaggggugccugcgggugggcggccgcugccacccccacgucaacgggguguucuucaacggcaucauccucgggcccgacggcaacgugcugauccccgagaugcaguccagccugcuccagcagcacauggagcugcuggucuccagcgugaucccgcucaugcacccccuggcggaccccuccaccguguucaagaacggggacgaggccgaggacuucgucgaggugcaccuccccgacgugcacgagcggaucagcggcgucgaccugggccugccgaacugggggaaguacgugcugcucuccgccggcgcccugaccgcccugaugcugaucaucuuccucaugaccugcuggcgccgggugaaccggagcgagcccacgcagcacaaccugcgcgggaccggccgggaggucuccgugaccccgcagagcgggaagaucaucuccagcugggaguccuacaagagcggcggcgagaccgggcugugaggacuaguacuggcugcaucucccuuuccucuguccuccauccuucucccaggauggugaagggggaccugguacccagugauccccaccccaggauccuaaaucaugacuuaccugcuaauaaaaacucauuggaaaagugagaagaucuaaaaaaaaaaaaaaaaaaaaaaaaaaaaaaaaaaaaaaaaaaaaaaaaaaaaaaaaaaaaaaaagaauu

SEQ ID NO: 203 - RNA, 957 nt, Artificial Sequence
  mRNA product Ndufa4_HsEPO(GC)_COX6B1_A64-C30-histoneSL
gggagaguccgcucagccagguugcagaagcggcuuagcguguguccuaaucuucucucugcguguagguaggccugugccgcaaacaagcuuaccaugggcgugcacgagugccccgccuggcuguggcuccugcugagccuccugucccugccgcucgggcugcccguccugggcgcccccccgcggcucaucugcgacagccgcgugcuggagcgguaccugcucgaggcgaaggaggccgagaacaucaccaccgggugcgccgagcacugcucccugaacgagaacaucacggugccggacaccaaggucaacuucuacgccuggaagcgcauggaggugggccagcaggccguggaggucuggcaggggcuggcgcuccugagcgaggccgugcugcggggccaggcccuccuggugaacuccagccagcccugggagccccugcagcuccacgucgacaaggccguguccggccugcgcagccugaccacccuccugcgggcgcugggggcccagaaggaggccaucucccccccggacgccgccagcgcggccccgcuccgcacgaucaccgccgacaccuuccggaagcuguuccgcguguacuccaacuuccugcggggcaagcucaagcuguacaccggggaggccugccgcacgggcgaccggugaggacuaguacuggcugcaucucccuuuccucuguccuccauccuucucccaggauggugaagggggaccugguacccagugauccccaccccaggauccuaaaucaugacuuaccugcuaauaaaaacucauuggaaaagugagaagaucuaaaaaaaaaaaaaaaaaaaaaaaaaaaaaaaaaaaaaaaaaaaaaaaaaaaaaaaaaaaaaaaaugcaucccccccccccccccccccccccccccccccaaaggcucuuuucagagccaccagaauu

SEQ ID NO: 204 - RNA, 898 nt, Artificial Sequence
  mRNA product Ndufa4_HsEPO(GC)_COX6B1_A64
gggagaguccgcucagccagguugcagaagcggcuuagcguguguccuaaucuucucucugcguguagguaggccugugccgcaaacaagcuuaccaugggcgugcacgagugccccgccuggcuguggcuccugcugagccuccugucccugccgcucgggcugcccguccugggcgcccccccgcggcucaucugcgacagccgcgugcuggagcgguaccugcucgaggcgaaggaggccgagaacaucaccaccgggugcgccgagcacugcucccugaacgagaacaucacggugccggacaccaaggucaacuucuacgccuggaagcgcauggaggugggccagcaggccguggaggucuggcaggggcuggcgcuccugagcgaggccgugcugcggggccaggcccuccuggugaacuccagccagcccugggagccccugcagcuccacgucgacaaggccguguccggccugcgcagccugaccacccuccugcgggcgcugggggcccagaaggaggccaucucccccccggacgccgccagcgcggccccgcuccgcacgaucaccgccgacaccuuccggaagcuguuccgcguguacuccaacuuccugcggggcaagcucaagcuguacaccggggaggccugccgcacgggcgaccggugaggacuaguacuggcugcaucucccuuuccucuguccuccauccuucucccaggauggugaagggggaccugguacccagugauccccaccccaggauccuaaaucaugacuuaccugcuaauaaaaacucauuggaaaagugagaagaucuaaaaaaaaaaaaaaaaaaaaaaaaaaaaaaaaaaaaaaaaaaaaaaaaaaaaaaaaaaaaaaaagaauu

SEQ ID NO: 205 - RNA, 2028 nt, Artificial Sequence
  mRNA product Ndufa4_PpLuc(GC)_COX6B1_A64-C30-histoneSL
gggagaguccgcucagccagguugcagaagcggcuuagcguguguccuaaucuucucucugcguguagguaggccugugccgcaaacaagcuuaccauggaggacgccaagaacaucaagaagggcccggcgcccuucuacccgcuggaggacgggaccgccggcgagcagcuccacaaggccaugaagcgguacgcccuggugccgggcacgaucgccuucaccgacgcccacaucgaggucgacaucaccuacgcggaguacuucgagaugagcgugcgccuggccgaggccaugaagcgguacggccugaacaccaaccaccggaucguggugugcucggagaacagccugcaguucuucaugccggugcugggcgcccucuucaucggcguggccgucgccccggcgaacgacaucuacaacgagcgggagcugcugaacagcauggggaucagccagccgaccgugguguucgugagcaagaagggccugcagaagauccugaacgugcagaagaagcugcccaucauccagaagaucaucaucauggacagcaagaccgacuaccagggcuuccagucgauguacacguucgugaccagccaccucccgccgggcuucaacgaguacgacuucgucccggagagcuucgaccgggacaagaccaucgcccugaucaugaacagcagcggcagcaccggccugccgaaggggguggcccugccgcaccggaccgccugcgugcgcuucucgcacgcccgggaccccaucuucggcaaccagaucaucccggacaccgccauccugagcguggugccguuccaccacggcuucggcauguucacgacccugggcuaccucaucugcggcuuccgggugguccugauguaccgguucgaggaggagcuguuccugcggagccugcaggacuacaagauccagagcgcgcugcucgugccgacccuguucagcuucuucgccaagagcacccugaucgacaaguacgaccugucgaaccugcacgagaucgccagcgggggcgccccgcugagcaaggaggugggcgaggccguggccaagcgguuccaccucccgggcauccgccagggcuacggccugaccgagaccacgagcgcgauccugaucacccccgagggggacgacaagccgggcgccgugggcaagguggucccguucuucgaggccaaggugguggaccuggacaccggcaagacccugggcgugaaccagcggggcgagcugugcgugcgggggccgaugaucaugagcggcuacgugaacaacccggaggccaccaacgcccucaucgacaaggacggcuggcugcacagcggcgacaucgccuacugggacgaggacgagcacuucuucaucgucgaccggcugaagucgcugaucaaguacaagggcuaccagguggcgccggccgagcuggagagcauccugcuccagcaccccaacaucuucgacgccggcguggccgggcugccggacgacgacgccggcgagcugccggccgcggugguggugcuggagcacggcaagaccaugacggagaaggagaucgucgacuacguggccagccaggugaccaccgccaagaagcugcggggcggcgugguguucguggacgaggucccgaagggccugaccgggaagcucgacgcccggaagauccgcgagauccugaucaaggccaagaagggcggcaagaucgccgugugaggacuaguacuggcugcaucucccuuuccucuguccuccauccuucucccaggauggugaagggggaccugguacccagugauccccaccccaggauccuaaaucaugacuuaccugcuaauaaaaacucauuggaaaagugagaagaucuaaaaaaaaaaaaaaaaaaaaaaaaaaaaaaaaaaaaaaaaaaaaaaaaaaaaaaaaaaaaaaaaugcaucccccccccccccccccccccccccccccccaaaggcucuuuucagagccaccagaauu

SEQ ID NO: 206 - RNA, 1969 nt, Artificial Sequence
  mRNA product Ndufa4_PpLuc(GC)_COX6B1_A64
gggagaguccgcucagccagguugcagaagcggcuuagcguguguccuaaucuucucucugcguguagguaggccugugccgcaaacaagcuuaccauggaggacgccaagaacaucaagaagggcccggcgcccuucuacccgcuggaggacgggaccgccggcgagcagcuccacaaggccaugaagcgguacgcccuggugccgggcacgaucgccuucaccgacgcccacaucgaggucgacaucaccuacgcggaguacuucgagaugagcgugcgccuggccgaggccaugaagcgguacggccugaacaccaaccaccggaucguggugugcucggagaacagccugcaguucuucaugccggugcugggcgcccucuucaucggcguggccgucgccccggcgaacgacaucuacaacgagcgggagcugcugaacagcauggggaucagccagccgaccgugguguucgugagcaagaagggccugcagaagauccugaacgugcagaagaagcugcccaucauccagaagaucaucaucauggacagcaagaccgacuaccagggcuuccagucgauguacacguucgugaccagccaccucccgccgggcuucaacgaguacgacuucgucccggagagcuucgaccgggacaagaccaucgcccugaucaugaacagcagcggcagcaccggccugccgaaggggguggcccugccgcaccggaccgccugcgugcgcuucucgcacgcccgggaccccaucuucggcaaccagaucaucccggacaccgccauccugagcguggugccguuccaccacggcuucggcauguucacgacccugggcuaccucaucugcggcuuccgggugguccugauguaccgguucgaggaggagcuguuccugcggagccugcaggacuacaagauccagagcgcgcugcucgugccgacccuguucagcuucuucgccaagagcacccugaucgacaaguacgaccugucgaaccugcacgagaucgccagcgggggcgccccgcugagcaaggaggugggcgaggccguggccaagcgguuccaccucccgggcauccgccagggcuacggccugaccgagaccacgagcgcgauccugaucacccccgagggggacgacaagccgggcgccgugggcaagguggucccguucuucgaggccaaggugguggaccuggacaccggcaagacccugggcgugaaccagcggggcgagcugugcgugcgggggccgaugaucaugagcggcuacgugaacaacccggaggccaccaacgcccucaucgacaaggacggcuggcugcacagcggcgacaucgccuacugggacgaggacgagcacuucuucaucgucgaccggcugaagucgcugaucaaguacaagggcuaccagguggcgccggccgagcuggagagcauccugcuccagcaccccaacaucuucgacgccggcguggccgggcugccggacgacgacgccggcgagcugccggccgcggugguggugcuggagcacggcaagaccaugacggagaaggagaucgucgacuacguggccagccaggugaccaccgccaagaagcugcggggcggcgugguguucguggacgaggucccgaagggccugaccgggaagcucgacgcccggaagauccgcgagauccugaucaaggccaagaagggcggcaagaucgccgugugaggacuaguacuggcugcaucucccuuuccucuguccuccauccuucucccaggauggugaagggggaccugguacccagugauccccaccccaggauccuaaaucaugacuuaccugcuaauaaaaacucauuggaaaagugagaagaucuaaaaaaaaaaaaaaaaaaaaaaaaaaaaaaaaaaaaaaaaaaaaaaaaaaaaaaaaaaaaaaaagaauu

SEQ ID NO: 207 - RNA, 2037 nt, Artificial Sequence
  mRNA product Ndufa4_protein of interest example 5_COX6B1_A64-C30-histoneSL
  misc_feature (97)..(1758): n is a, c, g, or u
gggagaguccgcucagccagguugcagaagcggcuuagcguguguccuaaucuucucucugcguguagguaggccugugccgcaaacaagcuuaccnnnnnnnnnnnnnnnnnnnnnnnnnnnnnnnnnnnnnnnnnnnnnnnnnnnnnnnnnnnnnnnnnnnnnnnnnnnnnnnnnnnnnnnnnnnnnnnnnnnnnnnnnnnnnnnnnnnnnnnnnnnnnnnnnnnnnnnnnnnnnnnnnnnnnnnnnnnnnnnnnnnnnnnnnnnnnnnnnnnnnnnnnnnnnnnnnnnnnnnnnnnnnnnnnnnnnnnnnnnnnnnnnnnnnnnnnnnnnnnnnnnnnnnnnnnnnnnnnnnnnnnnnnnnnnnnnnnnnnnnnnnnnnnnnnnnnnnnnnnnnnnnnnnnnnnnnnnnnnnnnnnnnnnnnnnnnnnnnnnnnnnnnnnnnnnnnnnnnnnnnnnnnnnnnnnnnnnnnnnnnnnnnnnnnnnnnnnnnnnnnnnnnnnnnnnnnnnnnnnnnnnnnnnnnnnnnnnnnnnnnnnnnnnnnnnnnnnnnnnnnnnnnnnnnnnnnnnnnnnnnnnnnnnnnnnnnnnnnnnnnnnnnnnnnnnnnnnnnnnnnnnnnnnnnnnnnnnnnnnnnnnnnnnnnnnnnnnnnnnnnnnnnnnnnnnnnnnnnnnnnnnnnnnnnnnnnnnnnnnnnnnnnnnnnnnnnnnnnnnnnnnnnnnnnnnnnnnnnnnnnnnnnnnnnnnnnnnnnnnnnnnnnnnnnnnnnnnnnnnnnnnnnnnnnnnnnnnnnnnnnnnnnnnnnnnnnnnnnnnnnnnnnnnnnnnnnnnnnnnnnnnnnnnnnnnnnnnnnnnnnnnnnnnnnnnnnnnnnnnnnnnnnnnnnnnnnnnnnnnnnnnnnnnnnnnnnnnnnnnnnnnnnnnnnnnnnnnnnnnnnnnnnnnnnnnnnnnnnnnnnnnnnnnnnnnnnnnnnnnnnnnnnnnnnnnnnnnnnnnnnnnnnnnnnnnnnnnnnnnnnnnnnnnnnnnnnnnnnnnnnnnnnnnnnnnnnnnnnnnnnnnnnnnnnnnnnnnnnnnnnnnnnnnnnnnnnnnnnnnnnnnnnnnnnnnnnnnnnnnnnnnnnnnnnnnnnnnnnnnnnnnnnnnnnnnnnnnnnnnnnnnnnnnnnnnnnnnnnnnnnnnnnnnnnnnnnnnnnnnnnnnnnnnnnnnnnnnnnnnnnnnnnnnnnnnnnnnnnnnnnnnnnnnnnnnnnnnnnnnnnnnnnnnnnnnnnnnnnnnnnnnnnnnnnnnnnnnnnnnnnnnnnnnnnnnnnnnnnnnnnnnnnnnnnnnnnnnnnnnnnnnnnnnnnnnnnnnnnnnnnnnnnnnnnnnnnnnnnnnnnnnnnnnnnnnnnnnnnnnnnnnnnnnnnnnnnnnnnnnnnnnnnnnnnnnnnnnnnnnnnnnnnnnnnnnnnnnnnnnnnnnnnnnnnnnnnnnnnnnnnnnnnnnnnnnnnnnnnnnnnnnnnnnnnnnnnnnnnnnnnnnnnnnnnnnnnnnnnnnnnnnnnnnnnnnnnnnnnnnnnnnnnnnnnnnnnnnnnnnnnnnnnnnnnnnnnnnnnnnnnnnnnnnnnnnnnnnnnnnnnnnnnnnnnnnnnnnnnnnnnnnnnnnnnnnnnnnnnnnnnnnnnnnnnnnnnnnnnnnnnnnnnnnnnnnnnnnnnnnnnnnnnnnnnnnnnnnnnnnnnnnnnnnnnnnnnnnnnnnnnnnnnnnnnnnnnnnnnnnnnnggacuaguacuggcugcaucucccuuuccucuguccuccauccuucucccaggauggugaagggggaccugguacccagugauccccaccccaggauccuaaaucaugacuuaccugcuaauaaaaacucauuggaaaagugagaagaucuaaaaaaaaaaaaaaaaaaaaaaaaaaaaaaaaaaaaaaaaaaaaaaaaaaaaaaaaaaaaaaaaugcaucccccccccccccccccccccccccccccccaaaggcucuuuucagagccaccagaauu

SEQ ID NO: 208 - RNA, 2166 nt, Artificial Sequence
  mRNA product Ndufa4_RAV-G(GC)_Gnas_A64-C30-histoneSL
gggagaguccgcucagccagguugcagaagcggcuuagcguguguccuaaucuucucucugcguguagguaggccugugccgcaaacaagcuuaccauggugccccaggcccuccuguucgucccgcugcugguguucccccucugcuucggcaaguuccccaucuacaccauccccgacaagcuggggccguggagccccaucgacauccaccaccuguccugccccaacaaccucguggucgaggacgagggcugcaccaaccugagcggguucuccuacauggagcugaaggugggcuacaucagcgccaucaagaugaacggguucacgugcaccggcguggucaccgaggcggagaccuacacgaacuucgugggcuacgugaccaccaccuucaagcggaagcacuuccgccccacgccggacgccugccgggccgccuacaacuggaagauggccggggacccccgcuacgaggagucccuccacaaccccuaccccgacuaccacuggcugcggaccgucaagaccaccaaggagagccuggugaucaucuccccgagcguggcggaccucgaccccuacgaccgcucccugcacagccgggucuuccccggcgggaacugcuccggcguggccgugagcuccacguacugcagcaccaaccacgacuacaccaucuggaugcccgagaacccgcgccuggggauguccugcgacaucuucaccaacagccggggcaagcgcgccuccaagggcagcgagacgugcggguucgucgacgagcggggccucuacaagucccugaagggggccugcaagcugaagcucugcggcgugcugggccugcgccucauggacgggaccuggguggcgaugcagaccagcaacgagaccaaguggugcccccccggccagcuggucaaccugcacgacuuccggagcgacgagaucgagcaccucgugguggaggagcuggucaagaagcgcgaggagugccuggacgcccucgaguccaucaugacgaccaagagcguguccuuccggcgccugagccaccuccggaagcuggugcccggguucggcaaggccuacaccaucuucaacaagacccugauggaggccgacgcccacuacaaguccguccgcacguggaacgagaucaucccgagcaaggggugccugcgggugggcggccgcugccacccccacgucaacgggguguucuucaacggcaucauccucgggcccgacggcaacgugcugauccccgagaugcaguccagccugcuccagcagcacauggagcugcuggucuccagcgugaucccgcucaugcacccccuggcggaccccuccaccguguucaagaacggggacgaggccgaggacuucgucgaggugcaccuccccgacgugcacgagcggaucagcggcgucgaccugggccugccgaacugggggaaguacgugcugcucuccgccggcgcccugaccgcccugaugcugaucaucuuccucaugaccugcuggcgccgggugaaccggagcgagcccacgcagcacaaccugcgcgggaccggccgggaggucuccgugaccccgcagagcgggaagaucaucuccagcugggaguccuacaagagcggcggcgagaccgggcugugaggacuagugaagggaacacccaaauuuaauucagccuuaagcacaauuaauuaagagugaaacguaauuguacaagcaguuggucacccaccauagggcaugaucaacaccgcaaccuuuccuuuuucccccagugauucugaaaaaccccucuucccuucagcuugcuuagauguuccaaauuuaguaagcuuaaggcggccuacagaagaaaaagaaaaaaaaggccacaaaaguucccucucacuuucaguaaauaaaauaaaagcagcaacagaaauaaagaaauaaaugaaauucaaaaugaaauaaauauuguguugugcagcauuaaaaaaucaauaaaaauuaaaaaugagcaagaucuaaaaaaaaaaaaaaaaaaaaaaaaaaaaaaaaaaaaaaaaaaaaaaaaaaaaaaaaaaaaaaaaugcaucccccccccccccccccccccccccccccccaaaggcucuuuucagagccaccagaauu

SEQ ID NO: 209 - RNA, 2107 nt, Artificial Sequence
  mRNA product Ndufa4_RAV-G(GC)_Gnas_A64
gggagaguccgcucagccagguugcagaagcggcuuagcguguguccuaaucuucucucugcguguagguaggccugugccgcaaacaagcuuaccauggugccccaggcccuccuguucgucccgcugcugguguucccccucugcuucggcaaguuccccaucuacaccauccccgacaagcuggggccguggagccccaucgacauccaccaccuguccugccccaacaaccucguggucgaggacgagggcugcaccaaccugagcggguucuccuacauggagcugaaggugggcuacaucagcgccaucaagaugaacggguucacgugcaccggcguggucaccgaggcggagaccuacacgaacuucgugggcuacgugaccaccaccuucaagcggaagcacuuccgccccacgccggacgccugccgggccgccuacaacuggaagauggccggggacccccgcuacgaggagucccuccacaaccccuaccccgacuaccacuggcugcggaccgucaagaccaccaaggagagccuggugaucaucuccccgagcguggcggaccucgaccccuacgaccgcucccugcacagccgggucuuccccggcgggaacugcuccggcguggccgugagcuccacguacugcagcaccaaccacgacuacaccaucuggaugcccgagaacccgcgccuggggauguccugcgacaucuucaccaacagccggggcaagcgcgccuccaagggcagcgagacgugcggguucgucgacgagcggggccucuacaagucccugaagggggccugcaagcugaagcucugcggcgugcugggccugcgccucauggacgggaccuggguggcgaugcagaccagcaacgagaccaaguggugcccccccggccagcuggucaaccugcacgacuuccggagcgacgagaucgagcaccucgugguggaggagcuggucaagaagcgcgaggagugccuggacgcccucgaguccaucaugacgaccaagagcguguccuuccggcgccugagccaccuccggaagcuggugcccggguucggcaaggccuacaccaucuucaacaagacccugauggaggccgacgcccacuacaaguccguccgcacguggaacgagaucaucccgagcaaggggugccugcgggugggcggccgcugccacccccacgucaacgggguguucuucaacggcaucauccucgggcccgacggcaacgugcugauccccgagaugcaguccagccugcuccagcagcacauggagcugcuggucuccagcgugaucccgcucaugcacccccuggcggaccccuccaccguguucaagaacggggacgaggccgaggacuucgucgaggugcaccuccccgacgugcacgagcggaucagcggcgucgaccugggccugccgaacugggggaaguacgugcugcucuccgccggcgcccugaccgcccugaugcugaucaucuuccucaugaccugcuggcgccgggugaaccggagcgagcccacgcagcacaaccugcgcgggaccggccgggaggucuccgugaccccgcagagcgggaagaucaucuccagcugggaguccuacaagagcggcggcgagaccgggcugugaggacuagugaagggaacacccaaauuuaauucagccuuaagcacaauuaauuaagagugaaacguaauuguacaagcaguuggucacccaccauagggcaugaucaacaccgcaaccuuuccuuuuucccccagugauucugaaaaaccccucuucccuucagcuugcuuagauguuccaaauuuaguaagcuuaaggcggccuacagaagaaaaagaaaaaaaaggccacaaaaguucccucucacuuucaguaaauaaaauaaaagcagcaacagaaauaaagaaauaaaugaaauucaaaaugaaauaaauauuguguugugcagcauuaaaaaaucaauaaaaauuaaaaaugagcaagaucuaaaaaaaaaaaaaaaaaaaaaaaaaaaaaaaaaaaaaaaaaaaaaaaaaaaaaaaaaaaaaaaagaauu

SEQ ID NO: 210 - RNA, 1173 nt, Artificial Sequence
  mRNA product Ndufa4_HsEPO(GC)_Gnas_A64-C30-histoneSL
gggagaguccgcucagccagguugcagaagcggcuuagcguguguccuaaucuucucucugcguguagguaggccugugccgcaaacaagcuuaccaugggcgugcacgagugccccgccuggcuguggcuccugcugagccuccugucccugccgcucgggcugcccguccugggcgcccccccgcggcucaucugcgacagccgcgugcuggagcgguaccugcucgaggcgaaggaggccgagaacaucaccaccgggugcgccgagcacugcucccugaacgagaacaucacggugccggacaccaaggucaacuucuacgccuggaagcgcauggaggugggccagcaggccguggaggucuggcaggggcuggcgcuccugagcgaggccgugcugcggggccaggcccuccuggugaacuccagccagcccugggagccccugcagcuccacgucgacaaggccguguccggccugcgcagccugaccacccuccugcgggcgcugggggcccagaaggaggccaucucccccccggacgccgccagcgcggccccgcuccgcacgaucaccgccgacaccuuccggaagcuguuccgcguguacuccaacuuccugcggggcaagcucaagcuguacaccggggaggccugccgcacgggcgaccggugaggacuagugaagggaacacccaaauuuaauucagccuuaagcacaauuaauuaagagugaaacguaauuguacaagcaguuggucacccaccauagggcaugaucaacaccgcaaccuuuccuuuuucccccagugauucugaaaaaccccucuucccuucagcuugcuuagauguuccaaauuuaguaagcuuaaggcggccuacagaagaaaaagaaaaaaaaggccacaaaaguucccucucacuuucaguaaauaaaauaaaagcagcaacagaaauaaagaaauaaaugaaauucaaaaugaaauaaauauuguguugugcagcauuaaaaaaucaauaaaaauuaaaaaugagcaagaucuaaaaaaaaaaaaaaaaaaaaaaaaaaaaaaaaaaaaaaaaaaaaaaaaaaaaaaaaaaaaaaaaugcaucccccccccccccccccccccccccccccccaaaggcucuuuucagagccaccagaauu

SEQ ID NO: 211 - RNA, 1114 nt, Artificial Sequence
  mRNA product Ndufa4_HsEPO(GC)_Gnas_A64
gggagaguccgcucagccagguugcagaagcggcuuagcguguguccuaaucuucucucugcguguagguaggccugugccgcaaacaagcuuaccaugggcgugcacgagugccccgccuggcuguggcuccugcugagccuccugucccugccgcucgggcugcccguccugggcgcccccccgcggcucaucugcgacagccgcgugcuggagcgguaccugcucgaggcgaaggaggccgagaacaucaccaccgggugcgccgagcacugcucccugaacgagaacaucacggugccggacaccaaggucaacuucuacgccuggaagcgcauggaggugggccagcaggccguggaggucuggcaggggcuggcgcuccugagcgaggccgugcugcggggccaggcccuccuggugaacuccagccagcccugggagccccugcagcuccacgucgacaaggccguguccggccugcgcagccugaccacccuccugcgggcgcugggggcccagaaggaggccaucucccccccggacgccgccagcgcggccccgcuccgcacgaucaccgccgacaccuuccggaagcuguuccgcguguacuccaacuuccugcggggcaagcucaagcuguacaccggggaggccugccgcacgggcgaccggugaggacuagugaagggaacacccaaauuuaauucagccuuaagcacaauuaauuaagagugaaacguaauuguacaagcaguuggucacccaccauagggcaugaucaacaccgcaaccuuuccuuuuucccccagugauucugaaaaaccccucuucccuucagcuugcuuagauguuccaaauuuaguaagcuuaaggcggccuacagaagaaaaagaaaaaaaaggccacaaaaguucccucucacuuucaguaaauaaaauaaaagcagcaacagaaauaaagaaauaaaugaaauucaaaaugaaauaaauauuguguugugcagcauuaaaaaaucaauaaaaauuaaaaaugagcaagaucuaaaaaaaaaaaaaaaaaaaaaaaaaaaaaaaaaaaaaaaaaaaaaaaaaaaaaaaaaaaaaaaagaauu

SEQ ID NO: 212 - RNA, 2244 nt, Artificial Sequence
  mRNA product Ndufa4_PpLuc(GC)_Gnas_A64-C30-histoneSL
gggagaguccgcucagccagguugcagaagcggcuuagcguguguccuaaucuucucucugcguguagguaggccugugccgcaaacaagcuuaccauggaggacgccaagaacaucaagaagggcccggcgcccuucuacccgcuggaggacgggaccgccggcgagcagcuccacaaggccaugaagcgguacgcccuggugccgggcacgaucgccuucaccgacgcccacaucgaggucgacaucaccuacgcggaguacuucgagaugagcgugcgccuggccgaggccaugaagcgguacggccugaacaccaaccaccggaucguggugugcucggagaacagccugcaguucuucaugccggugcugggcgcccucuucaucggcguggccgucgccccggcgaacgacaucuacaacgagcgggagcugcugaacagcauggggaucagccagccgaccgugguguucgugagcaagaagggccugcagaagauccugaacgugcagaagaagcugcccaucauccagaagaucaucaucauggacagcaagaccgacuaccagggcuuccagucgauguacacguucgugaccagccaccucccgccgggcuucaacgaguacgacuucgucccggagagcuucgaccgggacaagaccaucgcccugaucaugaacagcagcggcagcaccggccugccgaaggggguggcccugccgcaccggaccgccugcgugcgcuucucgcacgcccgggaccccaucuucggcaaccagaucaucccggacaccgccauccugagcguggugccguuccaccacggcuucggcauguucacgacccugggcuaccucaucugcggcuuccgggugguccugauguaccgguucgaggaggagcuguuccugcggagccugcaggacuacaagauccagagcgcgcugcucgugccgacccuguucagcuucuucgccaagagcacccugaucgacaaguacgaccugucgaaccugcacgagaucgccagcgggggcgccccgcugagcaaggaggugggcgaggccguggccaagcgguuccaccucccgggcauccgccagggcuacggccugaccgagaccacgagcgcgauccugaucacccccgagggggacgacaagccgggcgccgugggcaagguggucccguucuucgaggccaaggugguggaccuggacaccggcaagacccugggcgugaaccagcggggcgagcugugcgugcgggggccgaugaucaugagcggcuacgugaacaacccggaggccaccaacgcccucaucgacaaggacggcuggcugcacagcggcgacaucgccuacugggacgaggacgagcacuucuucaucgucgaccggcugaagucgcugaucaaguacaagggcuaccagguggcgccggccgagcuggagagcauccugcuccagcaccccaacaucuucgacgccggcguggccgggcugccggacgacgacgccggcgagcugccggccgcggugguggugcuggagcacggcaagaccaugacggagaaggagaucgucgacuacguggccagccaggugaccaccgccaagaagcugcggggcggcgugguguucguggacgaggucccgaagggccugaccgggaagcucgacgcccggaagauccgcgagauccugaucaaggccaagaagggcggcaagaucgccgugugaggacuagugaagggaacacccaaauuuaauucagccuuaagcacaauuaauuaagagugaaacguaauuguacaagcaguuggucacccaccauagggcaugaucaacaccgcaaccuuuccuuuuucccccagugauucugaaaaaccccucuucccuucagcuugcuuagauguuccaaauuuaguaagcuuaaggcggccuacagaagaaaaagaaaaaaaaggccacaaaaguucccucucacuuucaguaaauaaaauaaaagcagcaacagaaauaaagaaauaaaugaaauucaaaaugaaauaaauauuguguugugcagcauuaaaaaaucaauaaaaauuaaaaaugagcaagaucuaaaaaaaaaaaaaaaaaaaaaaaaaaaaaaaaaaaaaaaaaaaaaaaaaaaaaaaaaaaaaaaaugcaucccccccccccccccccccccccccccccccaaaggcucuuuucagagccaccagaauu

SEQ ID NO: 213 - RNA, 2185 nt, Artificial Sequence
  mRNA product Ndufa4_PpLuc(GC)_Gnas_A64
gggagaguccgcucagccagguugcagaagcggcuuagcguguguccuaaucuucucucugcguguagguaggccugugccgcaaacaagcuuaccauggaggacgccaagaacaucaagaagggcccggcgcccuucuacccgcuggaggacgggaccgccggcgagcagcuccacaaggccaugaagcgguacgcccuggugccgggcacgaucgccuucaccgacgcccacaucgaggucgacaucaccuacgcggaguacuucgagaugagcgugcgccuggccgaggccaugaagcgguacggccugaacaccaaccaccggaucguggugugcucggagaacagccugcaguucuucaugccggugcugggcgcccucuucaucggcguggccgucgccccggcgaacgacaucuacaacgagcgggagcugcugaacagcauggggaucagccagccgaccgugguguucgugagcaagaagggccugcagaagauccugaacgugcagaagaagcugcccaucauccagaagaucaucaucauggacagcaagaccgacuaccagggcuuccagucgauguacacguucgugaccagccaccucccgccgggcuucaacgaguacgacuucgucccggagagcuucgaccgggacaagaccaucgcccugaucaugaacagcagcggcagcaccggccugccgaaggggguggcccugccgcaccggaccgccugcgugcgcuucucgcacgcccgggaccccaucuucggcaaccagaucaucccggacaccgccauccugagcguggugccguuccaccacggcuucggcauguucacgacccugggcuaccucaucugcggcuuccgggugguccugauguaccgguucgaggaggagcuguuccugcggagccugcaggacuacaagauccagagcgcgcugcucgugccgacccuguucagcuucuucgccaagagcacccugaucgacaaguacgaccugucgaaccugcacgagaucgccagcgggggcgccccgcugagcaaggaggugggcgaggccguggccaagcgguuccaccucccgggcauccgccagggcuacggccugaccgagaccacgagcgcgauccugaucacccccgagggggacgacaagccgggcgccgugggcaagguggucccguucuucgaggccaaggugguggaccuggacaccggcaagacccugggcgugaaccagcggggcgagcugugcgugcgggggccgaugaucaugagcggcuacgugaacaacccggaggccaccaacgcccucaucgacaaggacggcuggcugcacagcggcgacaucgccuacugggacgaggacgagcacuucuucaucgucgaccggcugaagucgcugaucaaguacaagggcuaccagguggcgccggccgagcuggagagcauccugcuccagcaccccaacaucuucgacgccggcguggccgggcugccggacgacgacgccggcgagcugccggccgcggugguggugcuggagcacggcaagaccaugacggagaaggagaucgucgacuacguggccagccaggugaccaccgccaagaagcugcggggcggcgugguguucguggacgaggucccgaagggccugaccgggaagcucgacgcccggaagauccgcgagauccugaucaaggccaagaagggcggcaagaucgccgugugaggacuagugaagggaacacccaaauuuaauucagccuuaagcacaauuaauuaagagugaaacguaauuguacaagcaguuggucacccaccauagggcaugaucaacaccgcaaccuuuccuuuuucccccagugauucugaaaaaccccucuucccuucagcuugcuuagauguuccaaauuuaguaagcuuaaggcggccuacagaagaaaaagaaaaaaaaggccacaaaaguucccucucacuuucaguaaauaaaauaaaagcagcaacagaaauaaagaaauaaaugaaauucaaaaugaaauaaauauuguguugugcagcauuaaaaaaucaauaaaaauuaaaaaugagcaagaucuaaaaaaaaaaaaaaaaaaaaaaaaaaaaaaaaaaaaaaaaaaaaaaaaaaaaaaaaaaaaaaaagaauu

SEQ ID NO: 214 - RNA, 2253 nt, Artificial Sequence
  mRNA product Ndufa4_protein of interest example 5_Gnas_A64-C30-histoneSL
  misc_feature (97)..(1758): n is a, c, g, or u
gggagaguccgcucagccagguugcagaagcggcuuagcguguguccuaaucuucucucugcguguagguaggccugugccgcaaacaagcuuaccnnnnnnnnnnnnnnnnnnnnnnnnnnnnnnnnnnnnnnnnnnnnnnnnnnnnnnnnnnnnnnnnnnnnnnnnnnnnnnnnnnnnnnnnnnnnnnnnnnnnnnnnnnnnnnnnnnnnnnnnnnnnnnnnnnnnnnnnnnnnnnnnnnnnnnnnnnnnnnnnnnnnnnnnnnnnnnnnnnnnnnnnnnnnnnnnnnnnnnnnnnnnnnnnnnnnnnnnnnnnnnnnnnnnnnnnnnnnnnnnnnnnnnnnnnnnnnnnnnnnnnnnnnnnnnnnnnnnnnnnnnnnnnnnnnnnnnnnnnnnnnnnnnnnnnnnnnnnnnnnnnnnnnnnnnnnnnnnnnnnnnnnnnnnnnnnnnnnnnnnnnnnnnnnnnnnnnnnnnnnnnnnnnnnnnnnnnnnnnnnnnnnnnnnnnnnnnnnnnnnnnnnnnnnnnnnnnnnnnnnnnnnnnnnnnnnnnnnnnnnnnnnnnnnnnnnnnnnnnnnnnnnnnnnnnnnnnnnnnnnnnnnnnnnnnnnnnnnnnnnnnnnnnnnnnnnnnnnnnnnnnnnnnnnnnnnnnnnnnnnnnnnnnnnnnnnnnnnnnnnnnnnnnnnnnnnnnnnnnnnnnnnnnnnnnnnnnnnnnnnnnnnnnnnnnnnnnnnnnnnnnnnnnnnnnnnnnnnnnnnnnnnnnnnnnnnnnnnnnnnnnnnnnnnnnnnnnnnnnnnnnnnnnnnnnnnnnnnnnnnnnnnnnnnnnnnnnnnnnnnnnnnnnnnnnnnnnnnnnnnnnnnnnnnnnnnnnnnnnnnnnnnnnnnnnnnnnnnnnnnnnnnnnnnnnnnnnnnnnnnnnnnnnnnnnnnnnnnnnnnnnnnnnnnnnnnnnnnnnnnnnnnnnnnnnnnnnnnnnnnnnnnnnnnnnnnnnnnnnnnnnnnnnnnnnnnnnnnnnnnnnnnnnnnnnnnnnnnnnnnnnnnnnnnnnnnnnnnnnnnnnnnnnnnnnnnnnnnnnnnnnnnnnnnnnnnnnnnnnnnnnnnnnnnnnnnnnnnnnnnnnnnnnnnnnnnnnnnnnnnnnnnnnnnnnnnnnnnnnnnnnnnnnnnnnnnnnnnnnnnnnnnnnnnnnnnnnnnnnnnnnnnnnnnnnnnnnnnnnnnnnnnnnnnnnnnnnnnnnnnnnnnnnnnnnnnnnnnnnnnnnnnnnnnnnnnnnnnnnnnnnnnnnnnnnnnnnnnnnnnnnnnnnnnnnnnnnnnnnnnnnnnnnnnnnnnnnnnnnnnnnnnnnnnnnnnnnnnnnnnnnnnnnnnnnnnnnnnnnnnnnnnnnnnnnnnnnnnnnnnnnnnnnnnnnnnnnnnnnnnnnnnnnnnnnnnnnnnnnnnnnnnnnnnnnnnnnnnnnnnnnnnnnnnnnnnnnnnnnnnnnnnnnnnnnnnnnnnnnnnnnnnnnnnnnnnnnnnnnnnnnnnnnnnnnnnnnnnnnnnnnnnnnnnnnnnnnnnnnnnnnnnnnnnnnnnnnnnnnnnnnnnnnnnnnnnnnnnnnnnnnnnnnnnnnnnnnnnnnnnnnnnnnnnnnnnnnnnnnnnnnnnnnnnnnnnnnnnnnnnnnnnnnnnnnnnnnnnnnnnnnnnnnnnnnnnnnnnnnnnnnnnnnnnnnnnnnnnnnnnnnnnnnnnnnnnnnnnnnnnnnnnnnnnnnnnnnnnnnnnnnggacuagugaagggaacacccaaauuuaauucagccuuaagcacaauuaauuaagagugaaacguaauuguacaagcaguuggucacccaccauagggcaugaucaacaccgcaaccuuuccuuuuucccccagugauucugaaaaaccccucuucccuucagcuugcuuagauguuccaaauuuaguaagcuuaaggcggccuacagaagaaaaagaaaaaaaaggccacaaaaguucccucucacuuucaguaaauaaaauaaaagcagcaacagaaauaaagaaauaaaugaaauucaaaaugaaauaaauauuguguugugcagcauuaaaaaaucaauaaaaauuaaaaaugagcaagaucuaaaaaaaaaaaaaaaaaaaaaaaaaaaaaaaaaaaaaaaaaaaaaaaaaaaaaaaaaaaaaaaaugcaucccccccccccccccccccccccccccccccaaaggcucuuuucagagccaccagaauu

SEQ ID NO: 215 - RNA, 1946 nt, Artificial Sequence
  mRNA product Ndufa4_RAV-G(GC)_Ndufa1_A64-C30-histoneSL
gggagaguccgcucagccagguugcagaagcggcuuagcguguguccuaaucuucucucugcguguagguaggccugugccgcaaacaagcuuaccauggugccccaggcccuccuguucgucccgcugcugguguucccccucugcuucggcaaguuccccaucuacaccauccccgacaagcuggggccguggagccccaucgacauccaccaccuguccugccccaacaaccucguggucgaggacgagggcugcaccaaccugagcggguucuccuacauggagcugaaggugggcuacaucagcgccaucaagaugaacggguucacgugcaccggcguggucaccgaggcggagaccuacacgaacuucgugggcuacgugaccaccaccuucaagcggaagcacuuccgccccacgccggacgccugccgggccgccuacaacuggaagauggccggggacccccgcuacgaggagucccuccacaaccccuaccccgacuaccacuggcugcggaccgucaagaccaccaaggagagccuggugaucaucuccccgagcguggcggaccucgaccccuacgaccgcucccugcacagccgggucuuccccggcgggaacugcuccggcguggccgugagcuccacguacugcagcaccaaccacgacuacaccaucuggaugcccgagaacccgcgccuggggauguccugcgacaucuucaccaacagccggggcaagcgcgccuccaagggcagcgagacgugcggguucgucgacgagcggggccucuacaagucccugaagggggccugcaagcugaagcucugcggcgugcugggccugcgccucauggacgggaccuggguggcgaugcagaccagcaacgagaccaaguggugcccccccggccagcuggucaaccugcacgacuuccggagcgacgagaucgagcaccucgugguggaggagcuggucaagaagcgcgaggagugccuggacgcccucgaguccaucaugacgaccaagagcguguccuuccggcgccugagccaccuccggaagcuggugcccggguucggcaaggccuacaccaucuucaacaagacccugauggaggccgacgcccacuacaaguccguccgcacguggaacgagaucaucccgagcaaggggugccugcgggugggcggccgcugccacccccacgucaacgggguguucuucaacggcaucauccucgggcccgacggcaacgugcugauccccgagaugcaguccagccugcuccagcagcacauggagcugcuggucuccagcgugaucccgcucaugcacccccuggcggaccccuccaccguguucaagaacggggacgaggccgaggacuucgucgaggugcaccuccccgacgugcacgagcggaucagcggcgucgaccugggccugccgaacugggggaaguacgugcugcucuccgccggcgcccugaccgcccugaugcugaucaucuuccucaugaccugcuggcgccgggugaaccggagcgagcccacgcagcacaaccugcgcgggaccggccgggaggucuccgugaccccgcagagcgggaagaucaucuccagcugggaguccuacaagagcggcggcgagaccgggcugugaggacuaguggaagcauuuuccuggcugauuaaaagaaauuacucagcuauggucaucuguuccuguuagaaggcuaugcagcauauuauauacuaugcgcauguuaugaaaugcauaauaaaaaauuuuaaaaaaucuaaaagaucuaaaaaaaaaaaaaaaaaaaaaaaaaaaaaaaaaaaaaaaaaaaaaaaaaaaaaaaaaaaaaaaaugcaucccccccccccccccccccccccccccccccaaaggcucuuuucagagccaccagaauu

SEQ ID NO: 216 - RNA, 1887 nt, Artificial Sequence
  mRNA product Ndufa4_RAV-G(GC)_Ndufa1_A64
gggagaguccgcucagccagguugcagaagcggcuuagcguguguccuaaucuucucucugcguguagguaggccugugccgcaaacaagcuuaccauggugccccaggcccuccuguucgucccgcugcugguguucccccucugcuucggcaaguuccccaucuacaccauccccgacaagcuggggccguggagccccaucgacauccaccaccuguccugccccaacaaccucguggucgaggacgagggcugcaccaaccugagcggguucuccuacauggagcugaaggugggcuacaucagcgccaucaagaugaacggguucacgugcaccggcguggucaccgaggcggagaccuacacgaacuucgugggcuacgugaccaccaccuucaagcggaagcacuuccgccccacgccggacgccugccgggccgccuacaacuggaagauggccggggacccccgcuacgaggagucccuccacaaccccuaccccgacuaccacuggcugcggaccgucaagaccaccaaggagagccuggugaucaucuccccgagcguggcggaccucgaccccuacgaccgcucccugcacagccgggucuuccccggcgggaacugcuccggcguggccgugagcuccacguacugcagcaccaaccacgacuacaccaucuggaugcccgagaacccgcgccuggggauguccugcgacaucuucaccaacagccggggcaagcgcgccuccaagggcagcgagacgugcggguucgucgacgagcggggccucuacaagucccugaagggggccugcaagcugaagcucugcggcgugcugggccugcgccucauggacgggaccuggguggcgaugcagaccagcaacgagaccaaguggugcccccccggccagcuggucaaccugcacgacuuccggagcgacgagaucgagcaccucgugguggaggagcuggucaagaagcgcgaggagugccuggacgcccucgaguccaucaugacgaccaagagcguguccuuccggcgccugagccaccuccggaagcuggugcccggguucggcaaggccuacaccaucuucaacaagacccugauggaggccgacgcccacuacaaguccguccgcacguggaacgagaucaucccgagcaaggggugccugcgggugggcggccgcugccacccccacgucaacgggguguucuucaacggcaucauccucgggcccgacggcaacgugcugauccccgagaugcaguccagccugcuccagcagcacauggagcugcuggucuccagcgugaucccgcucaugcacccccuggcggaccccuccaccguguucaagaacggggacgaggccgaggacuucgucgaggugcaccuccccgacgugcacgagcggaucagcggcgucgaccugggccugccgaacugggggaaguacgugcugcucuccgccggcgcccugaccgcccugaugcugaucaucuuccucaugaccugcuggcgccgggugaaccggagcgagcccacgcagcacaaccugcgcgggaccggccgggaggucuccgugaccccgcagagcgggaagaucaucuccagcugggaguccuacaagagcggcggcgagaccgggcugugaggacuaguggaagcauuuuccuggcugauuaaaagaaauuacucagcuauggucaucuguuccuguuagaaggcuaugcagcauauuauauacuaugcgcauguuaugaaaugcauaauaaaaaauuuuaaaaaaucuaaaagaucuaaaaaaaaaaaaaaaaaaaaaaaaaaaaaaaaaaaaaaaaaaaaaaaaaaaaaaaaaaaaaaaagaauu

SEQ ID NO: 217 - RNA, 953 nt, Artificial Sequence
  mRNA product Ndufa4_HsEPO(GC)_Ndufa1_A64-C30-histoneSL
gggagaguccgcucagccagguugcagaagcggcuuagcguguguccuaaucuucucucugcguguagguaggccugugccgcaaacaagcuuaccaugggcgugcacgagugccccgccuggcuguggcuccugcugagccuccugucccugccgcucgggcugcccguccugggcgcccccccgcggcucaucugcgacagccgcgugcuggagcgguaccugcucgaggcgaaggaggccgagaacaucaccaccgggugcgccgagcacugcucccugaacgagaacaucacggugccggacaccaaggucaacuucuacgccuggaagcgcauggaggugggccagcaggccguggaggucuggcaggggcuggcgcuccugagcgaggccgugcugcggggccaggcccuccuggugaacuccagccagcccugggagccccugcagcuccacgucgacaaggccguguccggccugcgcagccugaccacccuccugcgggcgcugggggcccagaaggaggccaucucccccccggacgccgccagcgcggccccgcuccgcacgaucaccgccgacaccuuccggaagcuguuccgcguguacuccaacuuccugcggggcaagcucaagcuguacaccggggaggccugccgcacgggcgaccggugaggacuaguggaagcauuuuccuggcugauuaaaagaaauuacucagcuauggucaucuguuccuguuagaaggcuaugcagcauauuauauacuaugcgcauguuaugaaaugcauaauaaaaaauuuuaaaaaaucuaaaagaucuaaaaaaaaaaaaaaaaaaaaaaaaaaaaaaaaaaaaaaaaaaaaaaaaaaaaaaaaaaaaaaaaugcaucccccccccccccccccccccccccccccccaaaggcucuuuucagagccaccagaauu

SEQ ID NO: 218 - RNA, 894 nt, Artificial Sequence
  mRNA product Ndufa4_HsEPO(GC)_Ndufa1_A64
gggagaguccgcucagccagguugcagaagcggcuuagcguguguccuaaucuucucucugcguguagguaggccugugccgcaaacaagcuuaccaugggcgugcacgagugccccgccuggcuguggcuccugcugagccuccugucccugccgcucgggcugcccguccugggcgcccccccgcggcucaucugcgacagccgcgugcuggagcgguaccugcucgaggcgaaggaggccgagaacaucaccaccgggugcgccgagcacugcucccugaacgagaacaucacggugccggacaccaaggucaacuucuacgccuggaagcgcauggaggugggccagcaggccguggaggucuggcaggggcuggcgcuccugagcgaggccgugcugcggggccaggcccuccuggugaacuccagccagcccugggagccccugcagcuccacgucgacaaggccguguccggccugcgcagccugaccacccuccugcgggcgcugggggcccagaaggaggccaucucccccccggacgccgccagcgcggccccgcuccgcacgaucaccgccgacaccuuccggaagcuguuccgcguguacuccaacuuccugcggggcaagcucaagcuguacaccggggaggccugccgcacgggcgaccggugaggacuaguggaagcauuuuccuggcugauuaaaagaaauuacucagcuauggucaucuguuccuguuagaaggcuaugcagcauauuauauacuaugcgcauguuaugaaaugcauaauaaaaaauuuuaaaaaaucuaaaagaucuaaaaaaaaaaaaaaaaaaaaaaaaaaaaaaaaaaaaaaaaaaaaaaaaaaaaaaaaaaaaaaaagaauu

SEQ ID NO: 219 - RNA, 2024 nt, Artificial Sequence
  mRNA product Ndufa4_PpLuc(GC)_Ndufa1_A64-C30-histoneSL
gggagaguccgcucagccagguugcagaagcggcuuagcguguguccuaaucuucucucugcguguagguaggccugugccgcaaacaagcuuaccauggaggacgccaagaacaucaagaagggcccggcgcccuucuacccgcuggaggacgggaccgccggcgagcagcuccacaaggccaugaagcgguacgcccuggugccgggcacgaucgccuucaccgacgcccacaucgaggucgacaucaccuacgcggaguacuucgagaugagcgugcgccuggccgaggccaugaagcgguacggccugaacaccaaccaccggaucguggugugcucggagaacagccugcaguucuucaugccggugcugggcgcccucuucaucggcguggccgucgccccggcgaacgacaucuacaacgagcgggagcugcugaacagcauggggaucagccagccgaccgugguguucgugagcaagaagggccugcagaagauccugaacgugcagaagaagcugcccaucauccagaagaucaucaucauggacagcaagaccgacuaccagggcuuccagucgauguacacguucgugaccagccaccucccgccgggcuucaacgaguacgacuucgucccggagagcuucgaccgggacaagaccaucgcccugaucaugaacagcagcggcagcaccggccugccgaaggggguggcccugccgcaccggaccgccugcgugcgcuucucgcacgcccgggaccccaucuucggcaaccagaucaucccggacaccgccauccugagcguggugccguuccaccacggcuucggcauguucacgacccugggcuaccucaucugcggcuuccgggugguccugauguaccgguucgaggaggagcuguuccugcggagccugcaggacuacaagauccagagcgcgcugcucgugccgacccuguucagcuucuucgccaagagcacccugaucgacaaguacgaccugucgaaccugcacgagaucgccagcgggggcgccccgcugagcaaggaggugggcgaggccguggccaagcgguuccaccucccgggcauccgccagggcuacggccugaccgagaccacgagcgcgauccugaucacccccgagggggacgacaagccgggcgccgugggcaagguggucccguucuucgaggccaaggugguggaccuggacaccggcaagacccugggcgugaaccagcggggcgagcugugcgugcgggggccgaugaucaugagcggcuacgugaacaacccggaggccaccaacgcccucaucgacaaggacggcuggcugcacagcggcgacaucgccuacugggacgaggacgagcacuucuucaucgucgaccggcugaagucgcugaucaaguacaagggcuaccagguggcgccggccgagcuggagagcauccugcuccagcaccccaacaucuucgacgccggcguggccgggcugccggacgacgacgccggcgagcugccggccgcggugguggugcuggagcacggcaagaccaugacggagaaggagaucgucgacuacguggccagccaggugaccaccgccaagaagcugcggggcggcgugguguucguggacgaggucccgaagggccugaccgggaagcucgacgcccggaagauccgcgagauccugaucaaggccaagaagggcggcaagaucgccgugugaggacuaguggaagcauuuuccuggcugauuaaaagaaauuacucagcuauggucaucuguuccuguuagaaggcuaugcagcauauuauauacuaugcgcauguuaugaaaugcauaauaaaaaauuuuaaaaaaucuaaaagaucuaaaaaaaaaaaaaaaaaaaaaaaaaaaaaaaaaaaaaaaaaaaaaaaaaaaaaaaaaaaaaaaaugcaucccccccccccccccccccccccccccccccaaaggcucuuuucagagccaccagaauu

SEQ ID NO: 220 - RNA, 1965 nt, Artificial Sequence
  mRNA product Ndufa4_PpLuc(GC)_Ndufa1_A64
gggagaguccgcucagccagguugcagaagcggcuuagcguguguccuaaucuucucucugcguguagguaggccugugccgcaaacaagcuuaccauggaggacgccaagaacaucaagaagggcccggcgcccuucuacccgcuggaggacgggaccgccggcgagcagcuccacaaggccaugaagcgguacgcccuggugccgggcacgaucgccuucaccgacgcccacaucgaggucgacaucaccuacgcggaguacuucgagaugagcgugcgccuggccgaggccaugaagcgguacggccugaacaccaaccaccggaucguggugugcucggagaacagccugcaguucuucaugccggugcugggcgcccucuucaucggcguggccgucgccccggcgaacgacaucuacaacgagcgggagcugcugaacagcauggggaucagccagccgaccgugguguucgugagcaagaagggccugcagaagauccugaacgugcagaagaagcugcccaucauccagaagaucaucaucauggacagcaagaccgacuaccagggcuuccagucgauguacacguucgugaccagccaccucccgccgggcuucaacgaguacgacuucgucccggagagcuucgaccgggacaagaccaucgcccugaucaugaacagcagcggcagcaccggccugccgaaggggguggcccugccgcaccggaccgccugcgugcgcuucucgcacgcccgggaccccaucuucggcaaccagaucaucccggacaccgccauccugagcguggugccguuccaccacggcuucggcauguucacgacccugggcuaccucaucugcggcuuccgggugguccugauguaccgguucgaggaggagcuguuccugcggagccugcaggacuacaagauccagagcgcgcugcucgugccgacccuguucagcuucuucgccaagagcacccugaucgacaaguacgaccugucgaaccugcacgagaucgccagcgggggcgccccgcugagcaaggaggugggcgaggccguggccaagcgguuccaccucccgggcauccgccagggcuacggccugaccgagaccacgagcgcgauccugaucacccccgagggggacgacaagccgggcgccgugggcaagguggucccguucuucgaggccaaggugguggaccuggacaccggcaagacccugggcgugaaccagcggggcgagcugugcgugcgggggccgaugaucaugagcggcuacgugaacaacccggaggccaccaacgcccucaucgacaaggacggcuggcugcacagcggcgacaucgccuacugggacgaggacgagcacuucuucaucgucgaccggcugaagucgcugaucaaguacaagggcuaccagguggcgccggccgagcuggagagcauccugcuccagcaccccaacaucuucgacgccggcguggccgggcugccggacgacgacgccggcgagcugccggccgcggugguggugcuggagcacggcaagaccaugacggagaaggagaucgucgacuacguggccagccaggugaccaccgccaagaagcugcggggcggcgugguguucguggacgaggucccgaagggccugaccgggaagcucgacgcccggaagauccgcgagauccugaucaaggccaagaagggcggcaagaucgccgugugaggacuaguggaagcauuuuccuggcugauuaaaagaaauuacucagcuauggucaucuguuccuguuagaaggcuaugcagcauauuauauacuaugcgcauguuaugaaaugcauaauaaaaaauuuuaaaaaaucuaaaagaucuaaaaaaaaaaaaaaaaaaaaaaaaaaaaaaaaaaaaaaaaaaaaaaaaaaaaaaaaaaaaaaaagaauu

SEQ ID NO: 221 - RNA, 2033 nt, Artificial Sequence
  mRNA product Ndufa4_protein of interest example 5_Ndufa1_A64-C30-histoneSL
  misc_feature (97)..(1758): n is a, c, g, or u
gggagaguccgcucagccagguugcagaagcggcuuagcguguguccuaaucuucucucugcguguagguaggccugugccgcaaacaagcuuaccnnnnnnnnnnnnnnnnnnnnnnnnnnnnnnnnnnnnnnnnnnnnnnnnnnnnnnnnnnnnnnnnnnnnnnnnnnnnnnnnnnnnnnnnnnnnnnnnnnnnnnnnnnnnnnnnnnnnnnnnnnnnnnnnnnnnnnnnnnnnnnnnnnnnnnnnnnnnnnnnnnnnnnnnnnnnnnnnnnnnnnnnnnnnnnnnnnnnnnnnnnnnnnnnnnnnnnnnnnnnnnnnnnnnnnnnnnnnnnnnnnnnnnnnnnnnnnnnnnnnnnnnnnnnnnnnnnnnnnnnnnnnnnnnnnnnnnnnnnnnnnnnnnnnnnnnnnnnnnnnnnnnnnnnnnnnnnnnnnnnnnnnnnnnnnnnnnnnnnnnnnnnnnnnnnnnnnnnnnnnnnnnnnnnnnnnnnnnnnnnnnnnnnnnnnnnnnnnnnnnnnnnnnnnnnnnnnnnnnnnnnnnnnnnnnnnnnnnnnnnnnnnnnnnnnnnnnnnnnnnnnnnnnnnnnnnnnnnnnnnnnnnnnnnnnnnnnnnnnnnnnnnnnnnnnnnnnnnnnnnnnnnnnnnnnnnnnnnnnnnnnnnnnnnnnnnnnnnnnnnnnnnnnnnnnnnnnnnnnnnnnnnnnnnnnnnnnnnnnnnnnnnnnnnnnnnnnnnnnnnnnnnnnnnnnnnnnnnnnnnnnnnnnnnnnnnnnnnnnnnnnnnnnnnnnnnnnnnnnnnnnnnnnnnnnnnnnnnnnnnnnnnnnnnnnnnnnnnnnnnnnnnnnnnnnnnnnnnnnnnnnnnnnnnnnnnnnnnnnnnnnnnnnnnnnnnnnnnnnnnnnnnnnnnnnnnnnnnnnnnnnnnnnnnnnnnnnnnnnnnnnnnnnnnnnnnnnnnnnnnnnnnnnnnnnnnnnnnnnnnnnnnnnnnnnnnnnnnnnnnnnnnnnnnnnnnnnnnnnnnnnnnnnnnnnnnnnnnnnnnnnnnnnnnnnnnnnnnnnnnnnnnnnnnnnnnnnnnnnnnnnnnnnnnnnnnnnnnnnnnnnnnnnnnnnnnnnnnnnnnnnnnnnnnnnnnnnnnnnnnnnnnnnnnnnnnnnnnnnnnnnnnnnnnnnnnnnnnnnnnnnnnnnnnnnnnnnnnnnnnnnnnnnnnnnnnnnnnnnnnnnnnnnnnnnnnnnnnnnnnnnnnnnnnnnnnnnnnnnnnnnnnnnnnnnnnnnnnnnnnnnnnnnnnnnnnnnnnnnnnnnnnnnnnnnnnnnnnnnnnnnnnnnnnnnnnnnnnnnnnnnnnnnnnnnnnnnnnnnnnnnnnnnnnnnnnnnnnnnnnnnnnnnnnnnnnnnnnnnnnnnnnnnnnnnnnnnnnnnnnnnnnnnnnnnnnnnnnnnnnnnnnnnnnnnnnnnnnnnnnnnnnnnnnnnnnnnnnnnnnnnnnnnnnnnnnnnnnnnnnnnnnnnnnnnnnnnnnnnnnnnnnnnnnnnnnnnnnnnnnnnnnnnnnnnnnnnnnnnnnnnnnnnnnnnnnnnnnnnnnnnnnnnnnnnnnnnnnnnnnnnnnnnnnnnnnnnnnnnnnnnnnnnnnnnnnnnnnnnnnnnnnnnnnnnnnnnnnnnnnnnnnnnnnnnnnnnnnnnnnnnnnnnnnnnnnnnnnnnnnnnnnnnnnnnnnnnnnnnnnnnnnnnnnnnnnnnnnnnnnnnnnnnnnnnnnnnnnnnnnnnggacuaguggaagcauuuuccuggcugauuaaaagaaauuacucagcuauggucaucuguuccuguuagaaggcuaugcagcauauuauauacuaugcgcauguuaugaaaugcauaauaaaaaauuuuaaaaaaucuaaaagaucuaaaaaaaaaaaaaaaaaaaaaaaaaaaaaaaaaaaaaaaaaaaaaaaaaaaaaaaaaaaaaaaaugcaucccccccccccccccccccccccccccccccaaaggcucuuuucagagccaccagaauu

SEQ ID NO: 222 - RNA, 1883 nt, Artificial Sequence
  mRNA product Ndufa4_RAV-G(GC)_RPS9_A64-C30-histoneSL
gggagaguccgcucagccagguugcagaagcggcuuagcguguguccuaaucuucucucugcguguagguaggccugugccgcaaacaagcuuaccauggugccccaggcccuccuguucgucccgcugcugguguucccccucugcuucggcaaguuccccaucuacaccauccccgacaagcuggggccguggagccccaucgacauccaccaccuguccugccccaacaaccucguggucgaggacgagggcugcaccaaccugagcggguucuccuacauggagcugaaggugggcuacaucagcgccaucaagaugaacggguucacgugcaccggcguggucaccgaggcggagaccuacacgaacuucgugggcuacgugaccaccaccuucaagcggaagcacuuccgccccacgccggacgccugccgggccgccuacaacuggaagauggccggggacccccgcuacgaggagucccuccacaaccccuaccccgacuaccacuggcugcggaccgucaagaccaccaaggagagccuggugaucaucuccccgagcguggcggaccucgaccccuacgaccgcucccugcacagccgggucuuccccggcgggaacugcuccggcguggccgugagcuccacguacugcagcaccaaccacgacuacaccaucuggaugcccgagaacccgcgccuggggauguccugcgacaucuucaccaacagccggggcaagcgcgccuccaagggcagcgagacgugcggguucgucgacgagcggggccucuacaagucccugaagggggccugcaagcugaagcucugcggcgugcugggccugcgccucauggacgggaccuggguggcgaugcagaccagcaacgagaccaaguggugcccccccggccagcuggucaaccugcacgacuuccggagcgacgagaucgagcaccucgugguggaggagcuggucaagaagcgcgaggagugccuggacgcccucgaguccaucaugacgaccaagagcguguccuuccggcgccugagccaccuccggaagcuggugcccggguucggcaaggccuacaccaucuucaacaagacccugauggaggccgacgcccacuacaaguccguccgcacguggaacgagaucaucccgagcaaggggugccugcgggugggcggccgcugccacccccacgucaacgggguguucuucaacggcaucauccucgggcccgacggcaacgugcugauccccgagaugcaguccagccugcuccagcagcacauggagcugcuggucuccagcgugaucccgcucaugcacccccuggcggaccccuccaccguguucaagaacggggacgaggccgaggacuucgucgaggugcaccuccccgacgugcacgagcggaucagcggcgucgaccugggccugccgaacugggggaaguacgugcugcucuccgccggcgcccugaccgcccugaugcugaucaucuuccucaugaccugcuggcgccgggugaaccggagcgagcccacgcagcacaaccugcgcgggaccggccgggaggucuccgugaccccgcagagcgggaagaucaucuccagcugggaguccuacaagagcggcggcgagaccgggcugugaggacuaguguccaccugucccuccugggcugcuggauugucucguuuuccugccaaauaaacaggaucagcgcuuuacagaucuaaaaaaaaaaaaaaaaaaaaaaaaaaaaaaaaaaaaaaaaaaaaaaaaaaaaaaaaaaaaaaaaugcaucccccccccccccccccccccccccccccccaaaggcucuuuucagagccaccagaauu

SEQ ID NO: 223 - RNA, 1824 nt, Artificial Sequence
  mRNA product Ndufa4_RAV-G(GC)_RPS9_A64
gggagaguccgcucagccagguugcagaagcggcuuagcguguguccuaaucuucucucugcguguagguaggccugugccgcaaacaagcuuaccauggugccccaggcccuccuguucgucccgcugcugguguucccccucugcuucggcaaguuccccaucuacaccauccccgacaagcuggggccguggagccccaucgacauccaccaccuguccugccccaacaaccucguggucgaggacgagggcugcaccaaccugagcggguucuccuacauggagcugaaggugggcuacaucagcgccaucaagaugaacggguucacgugcaccggcguggucaccgaggcggagaccuacacgaacuucgugggcuacgugaccaccaccuucaagcggaagcacuuccgccccacgccggacgccugccgggccgccuacaacuggaagauggccggggacccccgcuacgaggagucccuccacaaccccuaccccgacuaccacuggcugcggaccgucaagaccaccaaggagagccuggugaucaucuccccgagcguggcggaccucgaccccuacgaccgcucccugcacagccgggucuuccccggcgggaacugcuccggcguggccgugagcuccacguacugcagcaccaaccacgacuacaccaucuggaugcccgagaacccgcgccuggggauguccugcgacaucuucaccaacagccggggcaagcgcgccuccaagggcagcgagacgugcggguucgucgacgagcggggccucuacaagucccugaagggggccugcaagcugaagcucugcggcgugcugggccugcgccucauggacgggaccuggguggcgaugcagaccagcaacgagaccaaguggugcccccccggccagcuggucaaccugcacgacuuccggagcgacgagaucgagcaccucgugguggaggagcuggucaagaagcgcgaggagugccuggacgcccucgaguccaucaugacgaccaagagcguguccuuccggcgccugagccaccuccggaagcuggugcccggguucggcaaggccuacaccaucuucaacaagacccugauggaggccgacgcccacuacaaguccguccgcacguggaacgagaucaucccgagcaaggggugccugcgggugggcggccgcugccacccccacgucaacgggguguucuucaacggcaucauccucgggcccgacggcaacgugcugauccccgagaugcaguccagccugcuccagcagcacauggagcugcuggucuccagcgugaucccgcucaugcacccccuggcggaccccuccaccguguucaagaacggggacgaggccgaggacuucgucgaggugcaccuccccgacgugcacgagcggaucagcggcgucgaccugggccugccgaacugggggaaguacgugcugcucuccgccggcgcccugaccgcccugaugcugaucaucuuccucaugaccugcuggcgccgggugaaccggagcgagcccacgcagcacaaccugcgcgggaccggccgggaggucuccgugaccccgcagagcgggaagaucaucuccagcugggaguccuacaagagcggcggcgagaccgggcugugaggacuaguguccaccugucccuccugggcugcuggauugucucguuuuccugccaaauaaacaggaucagcgcuuuacagaucuaaaaaaaaaaaaaaaaaaaaaaaaaaaaaaaaaaaaaaaaaaaaaaaaaaaaaaaaaaaaaaaagaauu

SEQ ID NO: 224 - RNA, 890 nt, Artificial Sequence
  mRNA product Ndufa4_HsEPO(GC)_RPS9_A64-C30-histoneSL
gggagaguccgcucagccagguugcagaagcggcuuagcguguguccuaaucuucucucugcguguagguaggccugugccgcaaacaagcuuaccaugggcgugcacgagugccccgccuggcuguggcuccugcugagccuccugucccugccgcucgggcugcccguccugggcgcccccccgcggcucaucugcgacagccgcgugcuggagcgguaccugcucgaggcgaaggaggccgagaacaucaccaccgggugcgccgagcacugcucccugaacgagaacaucacggugccggacaccaaggucaacuucuacgccuggaagcgcauggaggugggccagcaggccguggaggucuggcaggggcuggcgcuccugagcgaggccgugcugcggggccaggcccuccuggugaacuccagccagcccugggagccccugcagcuccacgucgacaaggccguguccggccugcgcagccugaccacccuccugcgggcgcugggggcccagaaggaggccaucucccccccggacgccgccagcgcggccccgcuccgcacgaucaccgccgacaccuuccggaagcuguuccgcguguacuccaacuuccugcggggcaagcucaagcuguacaccggggaggccugccgcacgggcgaccggugaggacuaguguccaccugucccuccugggcugcuggauugucucguuuuccugccaaauaaacaggaucagcgcuuuacagaucuaaaaaaaaaaaaaaaaaaaaaaaaaaaaaaaaaaaaaaaaaaaaaaaaaaaaaaaaaaaaaaaaugcaucccccccccccccccccccccccccccccccaaaggcucuuuucagagccaccagaauu

SEQ ID NO: 225 - RNA, 831 nt, Artificial Sequence
  mRNA product Ndufa4_HsEPO(GC)_RPS9_A64
gggagaguccgcucagccagguugcagaagcggcuuagcguguguccuaaucuucucucugcguguagguaggccugugccgcaaacaagcuuaccaugggcgugcacgagugccccgccuggcuguggcuccugcugagccuccugucccugccgcucgggcugcccguccugggcgcccccccgcggcucaucugcgacagccgcgugcuggagcgguaccugcucgaggcgaaggaggccgagaacaucaccaccgggugcgccgagcacugcucccugaacgagaacaucacggugccggacaccaaggucaacuucuacgccuggaagcgcauggaggugggccagcaggccguggaggucuggcaggggcuggcgcuccugagcgaggccgugcugcggggccaggcccuccuggugaacuccagccagcccugggagccccugcagcuccacgucgacaaggccguguccggccugcgcagccugaccacccuccugcgggcgcugggggcccagaaggaggccaucucccccccggacgccgccagcgcggccccgcuccgcacgaucaccgccgacaccuuccggaagcuguuccgcguguacuccaacuuccugcggggcaagcucaagcuguacaccggggaggccugccgcacgggcgaccggugaggacuaguguccaccugucccuccugggcugcuggauugucucguuuuccugccaaauaaacaggaucagcgcuuuacagaucuaaaaaaaaaaaaaaaaaaaaaaaaaaaaaaaaaaaaaaaaaaaaaaaaaaaaaaaaaaaaaaaagaauu

SEQ ID NO: 226 - RNA, 1961 nt, Artificial Sequence
  mRNA product Ndufa4_PpLuc(GC)_RPS9_A64-C30-histoneSL
gggagaguccgcucagccagguugcagaagcggcuuagcguguguccuaaucuucucucugcguguagguaggccugugccgcaaacaagcuuaccauggaggacgccaagaacaucaagaagggcccggcgcccuucuacccgcuggaggacgggaccgccggcgagcagcuccacaaggccaugaagcgguacgcccuggugccgggcacgaucgccuucaccgacgcccacaucgaggucgacaucaccuacgcggaguacuucgagaugagcgugcgccuggccgaggccaugaagcgguacggccugaacaccaaccaccggaucguggugugcucggagaacagccugcaguucuucaugccggugcugggcgcccucuucaucggcguggccgucgccccggcgaacgacaucuacaacgagcgggagcugcugaacagcauggggaucagccagccgaccgugguguucgugagcaagaagggccugcagaagauccugaacgugcagaagaagcugcccaucauccagaagaucaucaucauggacagcaagaccgacuaccagggcuuccagucgauguacacguucgugaccagccaccucccgccgggcuucaacgaguacgacuucgucccggagagcuucgaccgggacaagaccaucgcccugaucaugaacagcagcggcagcaccggccugccgaaggggguggcccugccgcaccggaccgccugcgugcgcuucucgcacgcccgggaccccaucuucggcaaccagaucaucccggacaccgccauccugagcguggugccguuccaccacggcuucggcauguucacgacccugggcuaccucaucugcggcuuccgggugguccugauguaccgguucgaggaggagcuguuccugcggagccugcaggacuacaagauccagagcgcgcugcucgugccgacccuguucagcuucuucgccaagagcacccugaucgacaaguacgaccugucgaaccugcacgagaucgccagcgggggcgccccgcugagcaaggaggugggcgaggccguggccaagcgguuccaccucccgggcauccgccagggcuacggccugaccgagaccacgagcgcgauccugaucacccccgagggggacgacaagccgggcgccgugggcaagguggucccguucuucgaggccaaggugguggaccuggacaccggcaagacccugggcgugaaccagcggggcgagcugugcgugcgggggccgaugaucaugagcggcuacgugaacaacccggaggccaccaacgcccucaucgacaaggacggcuggcugcacagcggcgacaucgccuacugggacgaggacgagcacuucuucaucgucgaccggcugaagucgcugaucaaguacaagggcuaccagguggcgccggccgagcuggagagcauccugcuccagcaccccaacaucuucgacgccggcguggccgggcugccggacgacgacgccggcgagcugccggccgcggugguggugcuggagcacggcaagaccaugacggagaaggagaucgucgacuacguggccagccaggugaccaccgccaagaagcugcggggcggcgugguguucguggacgaggucccgaagggccugaccgggaagcucgacgcccggaagauccgcgagauccugaucaaggccaagaagggcggcaagaucgccgugugaggacuaguguccaccugucccuccugggcugcuggauugucucguuuuccugccaaauaaacaggaucagcgcuuuacagaucuaaaaaaaaaaaaaaaaaaaaaaaaaaaaaaaaaaaaaaaaaaaaaaaaaaaaaaaaaaaaaaaaugcaucccccccccccccccccccccccccccccccaaaggcucuuuucagagccaccagaauu

SEQ ID NO: 227 - RNA, 1902 nt, Artificial Sequence
  mRNA product Ndufa4_PpLuc(GC)_RPS9_A64
gggagaguccgcucagccagguugcagaagcggcuuagcguguguccuaaucuucucucugcguguagguaggccugugccgcaaacaagcuuaccauggaggacgccaagaacaucaagaagggcccggcgcccuucuacccgcuggaggacgggaccgccggcgagcagcuccacaaggccaugaagcgguacgcccuggugccgggcacgaucgccuucaccgacgcccacaucgaggucgacaucaccuacgcggaguacuucgagaugagcgugcgccuggccgaggccaugaagcgguacggccugaacaccaaccaccggaucguggugugcucggagaacagccugcaguucuucaugccggugcugggcgcccucuucaucggcguggccgucgccccggcgaacgacaucuacaacgagcgggagcugcugaacagcauggggaucagccagccgaccgugguguucgugagcaagaagggccugcagaagauccugaacgugcagaagaagcugcccaucauccagaagaucaucaucauggacagcaagaccgacuaccagggcuuccagucgauguacacguucgugaccagccaccucccgccgggcuucaacgaguacgacuucgucccggagagcuucgaccgggacaagaccaucgcccugaucaugaacagcagcggcagcaccggccugccgaaggggguggcccugccgcaccggaccgccugcgugcgcuucucgcacgcccgggaccccaucuucggcaaccagaucaucccggacaccgccauccugagcguggugccguuccaccacggcuucggcauguucacgacccugggcuaccucaucugcggcuuccgggugguccugauguaccgguucgaggaggagcuguuccugcggagccugcaggacuacaagauccagagcgcgcugcucgugccgacccuguucagcuucuucgccaagagcacccugaucgacaaguacgaccugucgaaccugcacgagaucgccagcgggggcgccccgcugagcaaggaggugggcgaggccguggccaagcgguuccaccucccgggcauccgccagggcuacggccugaccgagaccacgagcgcgauccugaucacccccgagggggacgacaagccgggcgccgugggcaagguggucccguucuucgaggccaaggugguggaccuggacaccggcaagacccugggcgugaaccagcggggcgagcugugcgugcgggggccgaugaucaugagcggcuacgugaacaacccggaggccaccaacgcccucaucgacaaggacggcuggcugcacagcggcgacaucgccuacugggacgaggacgagcacuucuucaucgucgaccggcugaagucgcugaucaaguacaagggcuaccagguggcgccggccgagcuggagagcauccugcuccagcaccccaacaucuucgacgccggcguggccgggcugccggacgacgacgccggcgagcugccggccgcggugguggugcuggagcacggcaagaccaugacggagaaggagaucgucgacuacguggccagccaggugaccaccgccaagaagcugcggggcggcgugguguucguggacgaggucccgaagggccugaccgggaagcucgacgcccggaagauccgcgagauccugaucaaggccaagaagggcggcaagaucgccgugugaggacuaguguccaccugucccuccugggcugcuggauugucucguuuuccugccaaauaaacaggaucagcgcuuuacagaucuaaaaaaaaaaaaaaaaaaaaaaaaaaaaaaaaaaaaaaaaaaaaaaaaaaaaaaaaaaaaaaaagaauu

SEQ ID NO: 228 - RNA, 1970 nt, Artificial Sequence
  mRNA product Ndufa4_protein of interest example 5_RPS9_A64-C30-histoneSL
  misc_feature (97)..(1758): n is a, c, g, or u
gggagaguccgcucagccagguugcagaagcggcuuagcguguguccuaaucuucucucugcguguagguaggccugugccgcaaacaagcuuaccnnnnnnnnnnnnnnnnnnnnnnnnnnnnnnnnnnnnnnnnnnnnnnnnnnnnnnnnnnnnnnnnnnnnnnnnnnnnnnnnnnnnnnnnnnnnnnnnnnnnnnnnnnnnnnnnnnnnnnnnnnnnnnnnnnnnnnnnnnnnnnnnnnnnnnnnnnnnnnnnnnnnnnnnnnnnnnnnnnnnnnnnnnnnnnnnnnnnnnnnnnnnnnnnnnnnnnnnnnnnnnnnnnnnnnnnnnnnnnnnnnnnnnnnnnnnnnnnnnnnnnnnnnnnnnnnnnnnnnnnnnnnnnnnnnnnnnnnnnnnnnnnnnnnnnnnnnnnnnnnnnnnnnnnnnnnnnnnnnnnnnnnnnnnnnnnnnnnnnnnnnnnnnnnnnnnnnnnnnnnnnnnnnnnnnnnnnnnnnnnnnnnnnnnnnnnnnnnnnnnnnnnnnnnnnnnnnnnnnnnnnnnnnnnnnnnnnnnnnnnnnnnnnnnnnnnnnnnnnnnnnnnnnnnnnnnnnnnnnnnnnnnnnnnnnnnnnnnnnnnnnnnnnnnnnnnnnnnnnnnnnnnnnnnnnnnnnnnnnnnnnnnnnnnnnnnnnnnnnnnnnnnnnnnnnnnnnnnnnnnnnnnnnnnnnnnnnnnnnnnnnnnnnnnnnnnnnnnnnnnnnnnnnnnnnnnnnnnnnnnnnnnnnnnnnnnnnnnnnnnnnnnnnnnnnnnnnnnnnnnnnnnnnnnnnnnnnnnnnnnnnnnnnnnnnnnnnnnnnnnnnnnnnnnnnnnnnnnnnnnnnnnnnnnnnnnnnnnnnnnnnnnnnnnnnnnnnnnnnnnnnnnnnnnnnnnnnnnnnnnnnnnnnnnnnnnnnnnnnnnnnnnnnnnnnnnnnnnnnnnnnnnnnnnnnnnnnnnnnnnnnnnnnnnnnnnnnnnnnnnnnnnnnnnnnnnnnnnnnnnnnnnnnnnnnnnnnnnnnnnnnnnnnnnnnnnnnnnnnnnnnnnnnnnnnnnnnnnnnnnnnnnnnnnnnnnnnnnnnnnnnnnnnnnnnnnnnnnnnnnnnnnnnnnnnnnnnnnnnnnnnnnnnnnnnnnnnnnnnnnnnnnnnnnnnnnnnnnnnnnnnnnnnnnnnnnnnnnnnnnnnnnnnnnnnnnnnnnnnnnnnnnnnnnnnnnnnnnnnnnnnnnnnnnnnnnnnnnnnnnnnnnnnnnnnnnnnnnnnnnnnnnnnnnnnnnnnnnnnnnnnnnnnnnnnnnnnnnnnnnnnnnnnnnnnnnnnnnnnnnnnnnnnnnnnnnnnnnnnnnnnnnnnnnnnnnnnnnnnnnnnnnnnnnnnnnnnnnnnnnnnnnnnnnnnnnnnnnnnnnnnnnnnnnnnnnnnnnnnnnnnnnnnnnnnnnnnnnnnnnnnnnnnnnnnnnnnnnnnnnnnnnnnnnnnnnnnnnnnnnnnnnnnnnnnnnnnnnnnnnnnnnnnnnnnnnnnnnnnnnnnnnnnnnnnnnnnnnnnnnnnnnnnnnnnnnnnnnnnnnnnnnnnnnnnnnnnnnnnnnnnnnnnnnnnnnnnnnnnnnnnnnnnnnnnnnnnnnnnnnnnnnnnnnnnnnnnnnnnnnnnnnnnnnnnnnnnnnnnnnnnnnnnnnnnnnnnnnnnnnnnnnnnnnnnnnnnnnnnnnnnnnnnnnnnnnnnnnnnnnnnnnnnnnnnnnnnnnnnnnnnggacuaguguccaccugucccuccugggcugcuggauugucucguuuuccugccaaauaaacaggaucagcgcuuuacagaucuaaaaaaaaaaaaaaaaaaaaaaaaaaaaaaaaaaaaaaaaaaaaaaaaaaaaaaaaaaaaaaaaugcaucccccccccccccccccccccccccccccccaaaggcucuuuucagagccaccagaauu

SEQ ID NO: 229 - RNA, 1897 nt, Artificial Sequence
  mRNA product Nosip_RAV-G(GC)_PSMB3_A64-C30-histoneSL
gggagacuccugucgggcggaaguaggaggaguagaguuuaaaaacaguacucuuuuuccgguucgggacguaguugaagcaacgacaagccggauaaccgcucuugagacaggaagcuuaccauggugccccaggcccuccuguucgucccgcugcugguguucccccucugcuucggcaaguuccccaucuacaccauccccgacaagcuggggccguggagccccaucgacauccaccaccuguccugccccaacaaccucguggucgaggacgagggcugcaccaaccugagcggguucuccuacauggagcugaaggugggcuacaucagcgccaucaagaugaacggguucacgugcaccggcguggucaccgaggcggagaccuacacgaacuucgugggcuacgugaccaccaccuucaagcggaagcacuuccgccccacgccggacgccugccgggccgccuacaacuggaagauggccggggacccccgcuacgaggagucccuccacaaccccuaccccgacuaccacuggcugcggaccgucaagaccaccaaggagagccuggugaucaucuccccgagcguggcggaccucgaccccuacgaccgcucccugcacagccgggucuuccccggcgggaacugcuccggcguggccgugagcuccacguacugcagcaccaaccacgacuacaccaucuggaugcccgagaacccgcgccuggggauguccugcgacaucuucaccaacagccggggcaagcgcgccuccaagggcagcgagacgugcggguucgucgacgagcggggccucuacaagucccugaagggggccugcaagcugaagcucugcggcgugcugggccugcgccucauggacgggaccuggguggcgaugcagaccagcaacgagaccaaguggugcccccccggccagcuggucaaccugcacgacuuccggagcgacgagaucgagcaccucgugguggaggagcuggucaagaagcgcgaggagugccuggacgcccucgaguccaucaugacgaccaagagcguguccuuccggcgccugagccaccuccggaagcuggugcccggguucggcaaggccuacaccaucuucaacaagacccugauggaggccgacgcccacuacaaguccguccgcacguggaacgagaucaucccgagcaaggggugccugcgggugggcggccgcugccacccccacgucaacgggguguucuucaacggcaucauccucgggcccgacggcaacgugcugauccccgagaugcaguccagccugcuccagcagcacauggagcugcuggucuccagcgugaucccgcucaugcacccccuggcggaccccuccaccguguucaagaacggggacgaggccgaggacuucgucgaggugcaccuccccgacgugcacgagcggaucagcggcgucgaccugggccugccgaacugggggaaguacgugcugcucuccgccggcgcccugaccgcccugaugcugaucaucuuccucaugaccugcuggcgccgggugaaccggagcgagcccacgcagcacaaccugcgcgggaccggccgggaggucuccgugaccccgcagagcgggaagaucaucuccagcugggaguccuacaagagcggcggcgagaccgggcugugaggacuagucccuguucccagagcccacuuuuuuuucuuuuuuugaaauaaaauagccugucuuucagaucuaaaaaaaaaaaaaaaaaaaaaaaaaaaaaaaaaaaaaaaaaaaaaaaaaaaaaaaaaaaaaaaaugcaucccccccccccccccccccccccccccccccaaaggcucuuuucagagccaccagaauu

SEQ ID NO: 230 - RNA, 1838 nt, Artificial Sequence
  mRNA product Nosip_RAV-G(GC)_PSMB3_A64
gggagacuccugucgggcggaaguaggaggaguagaguuuaaaaacaguacucuuuuuccgguucgggacguaguugaagcaacgacaagccggauaaccgcucuugagacaggaagcuuaccauggugccccaggcccuccuguucgucccgcugcugguguucccccucugcuucggcaaguuccccaucuacaccauccccgacaagcuggggccguggagccccaucgacauccaccaccuguccugccccaacaaccucguggucgaggacgagggcugcaccaaccugagcggguucuccuacauggagcugaaggugggcuacaucagcgccaucaagaugaacggguucacgugcaccggcguggucaccgaggcggagaccuacacgaacuucgugggcuacgugaccaccaccuucaagcggaagcacuuccgccccacgccggacgccugccgggccgccuacaacuggaagauggccggggacccccgcuacgaggagucccuccacaaccccuaccccgacuaccacuggcugcggaccgucaagaccaccaaggagagccuggugaucaucuccccgagcguggcggaccucgaccccuacgaccgcucccugcacagccgggucuuccccggcgggaacugcuccggcguggccgugagcuccacguacugcagcaccaaccacgacuacaccaucuggaugcccgagaacccgcgccuggggauguccugcgacaucuucaccaacagccggggcaagcgcgccuccaagggcagcgagacgugcggguucgucgacgagcggggccucuacaagucccugaagggggccugcaagcugaagcucugcggcgugcugggccugcgccucauggacgggaccuggguggcgaugcagaccagcaacgagaccaaguggugcccccccggccagcuggucaaccugcacgacuuccggagcgacgagaucgagcaccucgugguggaggagcuggucaagaagcgcgaggagugccuggacgcccucgaguccaucaugacgaccaagagcguguccuuccggcgccugagccaccuccggaagcuggugcccggguucggcaaggccuacaccaucuucaacaagacccugauggaggccgacgcccacuacaaguccguccgcacguggaacgagaucaucccgagcaaggggugccugcgggugggcggccgcugccacccccacgucaacgggguguucuucaacggcaucauccucgggcccgacggcaacgugcugauccccgagaugcaguccagccugcuccagcagcacauggagcugcuggucuccagcgugaucccgcucaugcacccccuggcggaccccuccaccguguucaagaacggggacgaggccgaggacuucgucgaggugcaccuccccgacgugcacgagcggaucagcggcgucgaccugggccugccgaacugggggaaguacgugcugcucuccgccggcgcccugaccgcccugaugcugaucaucuuccucaugaccugcuggcgccgggugaaccggagcgagcccacgcagcacaaccugcgcgggaccggccgggaggucuccgugaccccgcagagcgggaagaucaucuccagcugggaguccuacaagagcggcggcgagaccgggcugugaggacuagucccuguucccagagcccacuuuuuuuucuuuuuuugaaauaaaauagccugucuuucagaucuaaaaaaaaaaaaaaaaaaaaaaaaaaaaaaaaaaaaaaaaaaaaaaaaaaaaaaaaaaaaaaaagaauu

SEQ ID NO: 231 - RNA, 904 nt, Artificial Sequence
  mRNA product Nosip_HsEPO(GC)_PSMB3_A64-C30-histoneSL
gggagacuccugucgggcggaaguaggaggaguagaguuuaaaaacaguacucuuuuuccgguucgggacguaguugaagcaacgacaagccggauaaccgcucuugagacaggaagcuuaccaugggcgugcacgagugccccgccuggcuguggcuccugcugagccuccugucccugccgcucgggcugcccguccugggcgcccccccgcggcucaucugcgacagccgcgugcuggagcgguaccugcucgaggcgaaggaggccgagaacaucaccaccgggugcgccgagcacugcucccugaacgagaacaucacggugccggacaccaaggucaacuucuacgccuggaagcgcauggaggugggccagcaggccguggaggucuggcaggggcuggcgcuccugagcgaggccgugcugcggggccaggcccuccuggugaacuccagccagcccugggagccccugcagcuccacgucgacaaggccguguccggccugcgcagccugaccacccuccugcgggcgcugggggcccagaaggaggccaucucccccccggacgccgccagcgcggccccgcuccgcacgaucaccgccgacaccuuccggaagcuguuccgcguguacuccaacuuccugcggggcaagcucaagcuguacaccggggaggccugccgcacgggcgaccggugaggacuagucccuguucccagagcccacuuuuuuuucuuuuuuugaaauaaaauagccugucuuucagaucuaaaaaaaaaaaaaaaaaaaaaaaaaaaaaaaaaaaaaaaaaaaaaaaaaaaaaaaaaaaaaaaaugcaucccccccccccccccccccccccccccccccaaaggcucuuuucagagccaccagaauu

SEQ ID NO: 232 - RNA, 845 nt, Artificial Sequence
  mRNA product Nosip_HsEPO(GC)_PSMB3_A64
gggagacuccugucgggcggaaguaggaggaguagaguuuaaaaacaguacucuuuuuccgguucgggacguaguugaagcaacgacaagccggauaaccgcucuugagacaggaagcuuaccaugggcgugcacgagugccccgccuggcuguggcuccugcugagccuccugucccugccgcucgggcugcccguccugggcgcccccccgcggcucaucugcgacagccgcgugcuggagcgguaccugcucgaggcgaaggaggccgagaacaucaccaccgggugcgccgagcacugcucccugaacgagaacaucacggugccggacaccaaggucaacuucuacgccuggaagcgcauggaggugggccagcaggccguggaggucuggcaggggcuggcgcuccugagcgaggccgugcugcggggccaggcccuccuggugaacuccagccagcccugggagccccugcagcuccacgucgacaaggccguguccggccugcgcagccugaccacccuccugcgggcgcugggggcccagaaggaggccaucucccccccggacgccgccagcgcggccccgcuccgcacgaucaccgccgacaccuuccggaagcuguuccgcguguacuccaacuuccugcggggcaagcucaagcuguacaccggggaggccugccgcacgggcgaccggugaggacuagucccuguucccagagcccacuuuuuuuucuuuuuuugaaauaaaauagccugucuuucagaucuaaaaaaaaaaaaaaaaaaaaaaaaaaaaaaaaaaaaaaaaaaaaaaaaaaaaaaaaaaaaaaaagaauu

SEQ ID NO: 233 - RNA, 1975 nt, Artificial Sequence
  mRNA product Nosip_PpLuc(GC)_PSMB3_A64-C30-histoneSL
gggagacuccugucgggcggaaguaggaggaguagaguuuaaaaacaguacucuuuuuccgguucgggacguaguugaagcaacgacaagccggauaaccgcucuugagacaggaagcuuaccauggaggacgccaagaacaucaagaagggcccggcgcccuucuacccgcuggaggacgggaccgccggcgagcagcuccacaaggccaugaagcgguacgcccuggugccgggcacgaucgccuucaccgacgcccacaucgaggucgacaucaccuacgcggaguacuucgagaugagcgugcgccuggccgaggccaugaagcgguacggccugaacaccaaccaccggaucguggugugcucggagaacagccugcaguucuucaugccggugcugggcgcccucuucaucggcguggccgucgccccggcgaacgacaucuacaacgagcgggagcugcugaacagcauggggaucagccagccgaccgugguguucgugagcaagaagggccugcagaagauccugaacgugcagaagaagcugcccaucauccagaagaucaucaucauggacagcaagaccgacuaccagggcuuccagucgauguacacguucgugaccagccaccucccgccgggcuucaacgaguacgacuucgucccggagagcuucgaccgggacaagaccaucgcccugaucaugaacagcagcggcagcaccggccugccgaaggggguggcccugccgcaccggaccgccugcgugcgcuucucgcacgcccgggaccccaucuucggcaaccagaucaucccggacaccgccauccugagcguggugccguuccaccacggcuucggcauguucacgacccugggcuaccucaucugcggcuuccgggugguccugauguaccgguucgaggaggagcuguuccugcggagccugcaggacuacaagauccagagcgcgcugcucgugccgacccuguucagcuucuucgccaagagcacccugaucgacaaguacgaccugucgaaccugcacgagaucgccagcgggggcgccccgcugagcaaggaggugggcgaggccguggccaagcgguuccaccucccgggcauccgccagggcuacggccugaccgagaccacgagcgcgauccugaucacccccgagggggacgacaagccgggcgccgugggcaagguggucccguucuucgaggccaaggugguggaccuggacaccggcaagacccugggcgugaaccagcggggcgagcugugcgugcgggggccgaugaucaugagcggcuacgugaacaacccggaggccaccaacgcccucaucgacaaggacggcuggcugcacagcggcgacaucgccuacugggacgaggacgagcacuucuucaucgucgaccggcugaagucgcugaucaaguacaagggcuaccagguggcgccggccgagcuggagagcauccugcuccagcaccccaacaucuucgacgccggcguggccgggcugccggacgacgacgccggcgagcugccggccgcggugguggugcuggagcacggcaagaccaugacggagaaggagaucgucgacuacguggccagccaggugaccaccgccaagaagcugcggggcggcgugguguucguggacgaggucccgaagggccugaccgggaagcucgacgcccggaagauccgcgagauccugaucaaggccaagaagggcggcaagaucgccgugugaggacuagucccuguucccagagcccacuuuuuuuucuuuuuuugaaauaaaauagccugucuuucagaucuaaaaaaaaaaaaaaaaaaaaaaaaaaaaaaaaaaaaaaaaaaaaaaaaaaaaaaaaaaaaaaaaugcaucccccccccccccccccccccccccccccccaaaggcucuuuucagagccaccagaauu

SEQ ID NO: 234 - RNA, 1916 nt, Artificial Sequence
  mRNA product Nosip_PpLuc(GC)_PSMB3_A64
gggagacuccugucgggcggaaguaggaggaguagaguuuaaaaacaguacucuuuuuccgguucgggacguaguugaagcaacgacaagccggauaaccgcucuugagacaggaagcuuaccauggaggacgccaagaacaucaagaagggcccggcgcccuucuacccgcuggaggacgggaccgccggcgagcagcuccacaaggccaugaagcgguacgcccuggugccgggcacgaucgccuucaccgacgcccacaucgaggucgacaucaccuacgcggaguacuucgagaugagcgugcgccuggccgaggccaugaagcgguacggccugaacaccaaccaccggaucguggugugcucggagaacagccugcaguucuucaugccggugcugggcgcccucuucaucggcguggccgucgccccggcgaacgacaucuacaacgagcgggagcugcugaacagcauggggaucagccagccgaccgugguguucgugagcaagaagggccugcagaagauccugaacgugcagaagaagcugcccaucauccagaagaucaucaucauggacagcaagaccgacuaccagggcuuccagucgauguacacguucgugaccagccaccucccgccgggcuucaacgaguacgacuucgucccggagagcuucgaccgggacaagaccaucgcccugaucaugaacagcagcggcagcaccggccugccgaaggggguggcccugccgcaccggaccgccugcgugcgcuucucgcacgcccgggaccccaucuucggcaaccagaucaucccggacaccgccauccugagcguggugccguuccaccacggcuucggcauguucacgacccugggcuaccucaucugcggcuuccgggugguccugauguaccgguucgaggaggagcuguuccugcggagccugcaggacuacaagauccagagcgcgcugcucgugccgacccuguucagcuucuucgccaagagcacccugaucgacaaguacgaccugucgaaccugcacgagaucgccagcgggggcgccccgcugagcaaggaggugggcgaggccguggccaagcgguuccaccucccgggcauccgccagggcuacggccugaccgagaccacgagcgcgauccugaucacccccgagggggacgacaagccgggcgccgugggcaagguggucccguucuucgaggccaaggugguggaccuggacaccggcaagacccugggcgugaaccagcggggcgagcugugcgugcgggggccgaugaucaugagcggcuacgugaacaacccggaggccaccaacgcccucaucgacaaggacggcuggcugcacagcggcgacaucgccuacugggacgaggacgagcacuucuucaucgucgaccggcugaagucgcugaucaaguacaagggcuaccagguggcgccggccgagcuggagagcauccugcuccagcaccccaacaucuucgacgccggcguggccgggcugccggacgacgacgccggcgagcugccggccgcggugguggugcuggagcacggcaagaccaugacggagaaggagaucgucgacuacguggccagccaggugaccaccgccaagaagcugcggggcggcgugguguucguggacgaggucccgaagggccugaccgggaagcucgacgcccggaagauccgcgagauccugaucaaggccaagaagggcggcaagaucgccgugugaggacuagucccuguucccagagcccacuuuuuuuucuuuuuuugaaauaaaauagccugucuuucagaucuaaaaaaaaaaaaaaaaaaaaaaaaaaaaaaaaaaaaaaaaaaaaaaaaaaaaaaaaaaaaaaaagaauu

SEQ ID NO: 235 - RNA, 1984 nt, Artificial Sequence
  mRNA product Nosip_protein of interest example 5_PSMB3_A64-C30-histoneSL
  misc_feature (124)..(1785): n is a, c, g, or u
gggagacuccugucgggcggaaguaggaggaguagaguuuaaaaacaguacucuuuuuccgguucgggacguaguugaagcaacgacaagccggauaaccgcucuugagacaggaagcuuaccnnnnnnnnnnnnnnnnnnnnnnnnnnnnnnnnnnnnnnnnnnnnnnnnnnnnnnnnnnnnnnnnnnnnnnnnnnnnnnnnnnnnnnnnnnnnnnnnnnnnnnnnnnnnnnnnnnnnnnnnnnnnnnnnnnnnnnnnnnnnnnnnnnnnnnnnnnnnnnnnnnnnnnnnnnnnnnnnnnnnnnnnnnnnnnnnnnnnnnnnnnnnnnnnnnnnnnnnnnnnnnnnnnnnnnnnnnnnnnnnnnnnnnnnnnnnnnnnnnnnnnnnnnnnnnnnnnnnnnnnnnnnnnnnnnnnnnnnnnnnnnnnnnnnnnnnnnnnnnnnnnnnnnnnnnnnnnnnnnnnnnnnnnnnnnnnnnnnnnnnnnnnnnnnnnnnnnnnnnnnnnnnnnnnnnnnnnnnnnnnnnnnnnnnnnnnnnnnnnnnnnnnnnnnnnnnnnnnnnnnnnnnnnnnnnnnnnnnnnnnnnnnnnnnnnnnnnnnnnnnnnnnnnnnnnnnnnnnnnnnnnnnnnnnnnnnnnnnnnnnnnnnnnnnnnnnnnnnnnnnnnnnnnnnnnnnnnnnnnnnnnnnnnnnnnnnnnnnnnnnnnnnnnnnnnnnnnnnnnnnnnnnnnnnnnnnnnnnnnnnnnnnnnnnnnnnnnnnnnnnnnnnnnnnnnnnnnnnnnnnnnnnnnnnnnnnnnnnnnnnnnnnnnnnnnnnnnnnnnnnnnnnnnnnnnnnnnnnnnnnnnnnnnnnnnnnnnnnnnnnnnnnnnnnnnnnnnnnnnnnnnnnnnnnnnnnnnnnnnnnnnnnnnnnnnnnnnnnnnnnnnnnnnnnnnnnnnnnnnnnnnnnnnnnnnnnnnnnnnnnnnnnnnnnnnnnnnnnnnnnnnnnnnnnnnnnnnnnnnnnnnnnnnnnnnnnnnnnnnnnnnnnnnnnnnnnnnnnnnnnnnnnnnnnnnnnnnnnnnnnnnnnnnnnnnnnnnnnnnnnnnnnnnnnnnnnnnnnnnnnnnnnnnnnnnnnnnnnnnnnnnnnnnnnnnnnnnnnnnnnnnnnnnnnnnnnnnnnnnnnnnnnnnnnnnnnnnnnnnnnnnnnnnnnnnnnnnnnnnnnnnnnnnnnnnnnnnnnnnnnnnnnnnnnnnnnnnnnnnnnnnnnnnnnnnnnnnnnnnnnnnnnnnnnnnnnnnnnnnnnnnnnnnnnnnnnnnnnnnnnnnnnnnnnnnnnnnnnnnnnnnnnnnnnnnnnnnnnnnnnnnnnnnnnnnnnnnnnnnnnnnnnnnnnnnnnnnnnnnnnnnnnnnnnnnnnnnnnnnnnnnnnnnnnnnnnnnnnnnnnnnnnnnnnnnnnnnnnnnnnnnnnnnnnnnnnnnnnnnnnnnnnnnnnnnnnnnnnnnnnnnnnnnnnnnnnnnnnnnnnnnnnnnnnnnnnnnnnnnnnnnnnnnnnnnnnnnnnnnnnnnnnnnnnnnnnnnnnnnnnnnnnnnnnnnnnnnnnnnnnnnnnnnnnnnnnnnnnnnnnnnnnnnnnnnnnnnnnnnnnnnnnnnnnnnnnnnnnnnnnnnnnnnnnnnnnnnnnnnnnnnnnnnnnnnnnnnnnnnnnnnnnnnnnnnnnnnnnnnnnnnnnnnnnnnnnnnnnnnnnnnnnnnnnnnnnnnnnnnnnnnnnnnnnnnnnnnnnnnnnnnnnnnnnnnnnnnnnnnnnnnggacuagucccuguucccagagcccacuuuuuuuucuuuuuuugaaauaaaauagccugucuuucagaucuaaaaaaaaaaaaaaaaaaaaaaaaaaaaaaaaaaaaaaaaaaaaaaaaaaaaaaaaaaaaaaaaugcaucccccccccccccccccccccccccccccccaaaggcucuuuucagagccaccagaauu

SEQ ID NO: 236 - RNA, 1961 nt, Artificial Sequence
  mRNA product Nosip_RAV-G(GC)_CASP1_A64-C30-histoneSL
gggagacuccugucgggcggaaguaggaggaguagaguuuaaaaacaguacucuuuuuccgguucgggacguaguugaagcaacgacaagccggauaaccgcucuugagacaggaagcuuaccauggugccccaggcccuccuguucgucccgcugcugguguucccccucugcuucggcaaguuccccaucuacaccauccccgacaagcuggggccguggagccccaucgacauccaccaccuguccugccccaacaaccucguggucgaggacgagggcugcaccaaccugagcggguucuccuacauggagcugaaggugggcuacaucagcgccaucaagaugaacggguucacgugcaccggcguggucaccgaggcggagaccuacacgaacuucgugggcuacgugaccaccaccuucaagcggaagcacuuccgccccacgccggacgccugccgggccgccuacaacuggaagauggccggggacccccgcuacgaggagucccuccacaaccccuaccccgacuaccacuggcugcggaccgucaagaccaccaaggagagccuggugaucaucuccccgagcguggcggaccucgaccccuacgaccgcucccugcacagccgggucuuccccggcgggaacugcuccggcguggccgugagcuccacguacugcagcaccaaccacgacuacaccaucuggaugcccgagaacccgcgccuggggauguccugcgacaucuucaccaacagccggggcaagcgcgccuccaagggcagcgagacgugcggguucgucgacgagcggggccucuacaagucccugaagggggccugcaagcugaagcucugcggcgugcugggccugcgccucauggacgggaccuggguggcgaugcagaccagcaacgagaccaaguggugcccccccggccagcuggucaaccugcacgacuuccggagcgacgagaucgagcaccucgugguggaggagcuggucaagaagcgcgaggagugccuggacgcccucgaguccaucaugacgaccaagagcguguccuuccggcgccugagccaccuccggaagcuggugcccggguucggcaaggccuacaccaucuucaacaagacccugauggaggccgacgcccacuacaaguccguccgcacguggaacgagaucaucccgagcaaggggugccugcgggugggcggccgcugccacccccacgucaacgggguguucuucaacggcaucauccucgggcccgacggcaacgugcugauccccgagaugcaguccagccugcuccagcagcacauggagcugcuggucuccagcgugaucccgcucaugcacccccuggcggaccccuccaccguguucaagaacggggacgaggccgaggacuucgucgaggugcaccuccccgacgugcacgagcggaucagcggcgucgaccugggccugccgaacugggggaaguacgugcugcucuccgccggcgcccugaccgcccugaugcugaucaucuuccucaugaccugcuggcgccgggugaaccggagcgagcccacgcagcacaaccugcgcgggaccggccgggaggucuccgugaccccgcagagcgggaagaucaucuccagcugggaguccuacaagagcggcggcgagaccgggcugugaggacuaguaauaaggaaacuguaugaaugucugugggcaggaagugaagagauccuucuguaaagguuuuuggaauuaugucugcugaauaauaaacuuuuuugaaauaauaaaucugguagaaaaaugagaucuaaaaaaaaaaaaaaaaaaaaaaaaaaaaaaaaaaaaaaaaaaaaaaaaaaaaaaaaaaaaaaaaugcaucccccccccccccccccccccccccccccccaaaggcucuuuucagagccaccagaauu

SEQ ID NO: 237 - RNA, 1902 nt, Artificial Sequence
  mRNA product Nosip_RAV-G(GC)_CASP1_A64
gggagacuccugucgggcggaaguaggaggaguagaguuuaaaaacaguacucuuuuuccgguucgggacguaguugaagcaacgacaagccggauaaccgcucuugagacaggaagcuuaccauggugccccaggcccuccuguucgucccgcugcugguguucccccucugcuucggcaaguuccccaucuacaccauccccgacaagcuggggccguggagccccaucgacauccaccaccuguccugccccaacaaccucguggucgaggacgagggcugcaccaaccugagcggguucuccuacauggagcugaaggugggcuacaucagcgccaucaagaugaacggguucacgugcaccggcguggucaccgaggcggagaccuacacgaacuucgugggcuacgugaccaccaccuucaagcggaagcacuuccgccccacgccggacgccugccgggccgccuacaacuggaagauggccggggacccccgcuacgaggagucccuccacaaccccuaccccgacuaccacuggcugcggaccgucaagaccaccaaggagagccuggugaucaucuccccgagcguggcggaccucgaccccuacgaccgcucccugcacagccgggucuuccccggcgggaacugcuccggcguggccgugagcuccacguacugcagcaccaaccacgacuacaccaucuggaugcccgagaacccgcgccuggggauguccugcgacaucuucaccaacagccggggcaagcgcgccuccaagggcagcgagacgugcggguucgucgacgagcggggccucuacaagucccugaagggggccugcaagcugaagcucugcggcgugcugggccugcgccucauggacgggaccuggguggcgaugcagaccagcaacgagaccaaguggugcccccccggccagcuggucaaccugcacgacuuccggagcgacgagaucgagcaccucgugguggaggagcuggucaagaagcgcgaggagugccuggacgcccucgaguccaucaugacgaccaagagcguguccuuccggcgccugagccaccuccggaagcuggugcccggguucggcaaggccuacaccaucuucaacaagacccugauggaggccgacgcccacuacaaguccguccgcacguggaacgagaucaucccgagcaaggggugccugcgggugggcggccgcugccacccccacgucaacgggguguucuucaacggcaucauccucgggcccgacggcaacgugcugauccccgagaugcaguccagccugcuccagcagcacauggagcugcuggucuccagcgugaucccgcucaugcacccccuggcggaccccuccaccguguucaagaacggggacgaggccgaggacuucgucgaggugcaccuccccgacgugcacgagcggaucagcggcgucgaccugggccugccgaacugggggaaguacgugcugcucuccgccggcgcccugaccgcccugaugcugaucaucuuccucaugaccugcuggcgccgggugaaccggagcgagcccacgcagcacaaccugcgcgggaccggccgggaggucuccgugaccccgcagagcgggaagaucaucuccagcugggaguccuacaagagcggcggcgagaccgggcugugaggacuaguaauaaggaaacuguaugaaugucugugggcaggaagugaagagauccuucuguaaagguuuuuggaauuaugucugcugaauaauaaacuuuuuugaaauaauaaaucugguagaaaaaugagaucuaaaaaaaaaaaaaaaaaaaaaaaaaaaaaaaaaaaaaaaaaaaaaaaaaaaaaaaaaaaaaaaagaauu

SEQ ID NO: 238 - RNA, 968 nt, Artificial Sequence
  mRNA product Nosip_HsEPO(GC)_CASP1_A64-C30-histoneSL
gggagacuccugucgggcggaaguaggaggaguagaguuuaaaaacaguacucuuuuuccgguucgggacguaguugaagcaacgacaagccggauaaccgcucuugagacaggaagcuuaccaugggcgugcacgagugccccgccuggcuguggcuccugcugagccuccugucccugccgcucgggcugcccguccugggcgcccccccgcggcucaucugcgacagccgcgugcuggagcgguaccugcucgaggcgaaggaggccgagaacaucaccaccgggugcgccgagcacugcucccugaacgagaacaucacggugccggacaccaaggucaacuucuacgccuggaagcgcauggaggugggccagcaggccguggaggucuggcaggggcuggcgcuccugagcgaggccgugcugcggggccaggcccuccuggugaacuccagccagcccugggagccccugcagcuccacgucgacaaggccguguccggccugcgcagccugaccacccuccugcgggcgcugggggcccagaaggaggccaucucccccccggacgccgccagcgcggccccgcuccgcacgaucaccgccgacaccuuccggaagcuguuccgcguguacuccaacuuccugcggggcaagcucaagcuguacaccggggaggccugccgcacgggcgaccggugaggacuaguaauaaggaaacuguaugaaugucugugggcaggaagugaagagauccuucuguaaagguuuuuggaauuaugucugcugaauaauaaacuuuuuugaaauaauaaaucugguagaaaaaugagaucuaaaaaaaaaaaaaaaaaaaaaaaaaaaaaaaaaaaaaaaaaaaaaaaaaaaaaaaaaaaaaaaaugcaucccccccccccccccccccccccccccccccaaaggcucuuuucagagccaccagaauu

SEQ ID NO: 239 - RNA, 909 nt, Artificial Sequence
  mRNA product Nosip_HsEPO(GC)_CASP1_A64
gggagacuccugucgggcggaaguaggaggaguagaguuuaaaaacaguacucuuuuuccgguucgggacguaguugaagcaacgacaagccggauaaccgcucuugagacaggaagcuuaccaugggcgugcacgagugccccgccuggcuguggcuccugcugagccuccugucccugccgcucgggcugcccguccugggcgcccccccgcggcucaucugcgacagccgcgugcuggagcgguaccugcucgaggcgaaggaggccgagaacaucaccaccgggugcgccgagcacugcucccugaacgagaacaucacggugccggacaccaaggucaacuucuacgccuggaagcgcauggaggugggccagcaggccguggaggucuggcaggggcuggcgcuccugagcgaggccgugcugcggggccaggcccuccuggugaacuccagccagcccugggagccccugcagcuccacgucgacaaggccguguccggccugcgcagccugaccacccuccugcgggcgcugggggcccagaaggaggccaucucccccccggacgccgccagcgcggccccgcuccgcacgaucaccgccgacaccuuccggaagcuguuccgcguguacuccaacuuccugcggggcaagcucaagcuguacaccggggaggccugccgcacgggcgaccggugaggacuaguaauaaggaaacuguaugaaugucugugggcaggaagugaagagauccuucuguaaagguuuuuggaauuaugucugcugaauaauaaacuuuuuugaaauaauaaaucugguagaaaaaugagaucuaaaaaaaaaaaaaaaaaaaaaaaaaaaaaaaaaaaaaaaaaaaaaaaaaaaaaaaaaaaaaaaagaauu

SEQ ID NO: 240 - RNA, 2039 nt, Artificial Sequence
  mRNA product Nosip_PpLuc(GC)_CASP1_A64-C30-histoneSL
gggagacuccugucgggcggaaguaggaggaguagaguuuaaaaacaguacucuuuuuccgguucgggacguaguugaagcaacgacaagccggauaaccgcucuugagacaggaagcuuaccauggaggacgccaagaacaucaagaagggcccggcgcccuucuacccgcuggaggacgggaccgccggcgagcagcuccacaaggccaugaagcgguacgcccuggugccgggcacgaucgccuucaccgacgcccacaucgaggucgacaucaccuacgcggaguacuucgagaugagcgugcgccuggccgaggccaugaagcgguacggccugaacaccaaccaccggaucguggugugcucggagaacagccugcaguucuucaugccggugcugggcgcccucuucaucggcguggccgucgccccggcgaacgacaucuacaacgagcgggagcugcugaacagcauggggaucagccagccgaccgugguguucgugagcaagaagggccugcagaagauccugaacgugcagaagaagcugcccaucauccagaagaucaucaucauggacagcaagaccgacuaccagggcuuccagucgauguacacguucgugaccagccaccucccgccgggcuucaacgaguacgacuucgucccggagagcuucgaccgggacaagaccaucgcccugaucaugaacagcagcggcagcaccggccugccgaaggggguggcccugccgcaccggaccgccugcgugcgcuucucgcacgcccgggaccccaucuucggcaaccagaucaucccggacaccgccauccugagcguggugccguuccaccacggcuucggcauguucacgacccugggcuaccucaucugcggcuuccgggugguccugauguaccgguucgaggaggagcuguuccugcggagccugcaggacuacaagauccagagcgcgcugcucgugccgacccuguucagcuucuucgccaagagcacccugaucgacaaguacgaccugucgaaccugcacgagaucgccagcgggggcgccccgcugagcaaggaggugggcgaggccguggccaagcgguuccaccucccgggcauccgccagggcuacggccugaccgagaccacgagcgcgauccugaucacccccgagggggacgacaagccgggcgccgugggcaagguggucccguucuucgaggccaaggugguggaccuggacaccggcaagacccugggcgugaaccagcggggcgagcugugcgugcgggggccgaugaucaugagcggcuacgugaacaacccggaggccaccaacgcccucaucgacaaggacggcuggcugcacagcggcgacaucgccuacugggacgaggacgagcacuucuucaucgucgaccggcugaagucgcugaucaaguacaagggcuaccagguggcgccggccgagcuggagagcauccugcuccagcaccccaacaucuucgacgccggcguggccgggcugccggacgacgacgccggcgagcugccggccgcggugguggugcuggagcacggcaagaccaugacggagaaggagaucgucgacuacguggccagccaggugaccaccgccaagaagcugcggggcggcgugguguucguggacgaggucccgaagggccugaccgggaagcucgacgcccggaagauccgcgagauccugaucaaggccaagaagggcggcaagaucgccgugugaggacuaguaauaaggaaacuguaugaaugucugugggcaggaagugaagagauccuucuguaaagguuuuuggaauuaugucugcugaauaauaaacuuuuuugaaauaauaaaucugguagaaaaaugagaucuaaaaaaaaaaaaaaaaaaaaaaaaaaaaaaaaaaaaaaaaaaaaaaaaaaaaaaaaaaaaaaaaugcaucccccccccccccccccccccccccccccccaaaggcucuuuucagagccaccagaauu

SEQ ID NO: 241 - RNA, 1980 nt, Artificial Sequence
  mRNA product Nosip_PpLuc(GC)_CASP1_A64
gggagacuccugucgggcggaaguaggaggaguagaguuuaaaaacaguacucuuuuuccgguucgggacguaguugaagcaacgacaagccggauaaccgcucuugagacaggaagcuuaccauggaggacgccaagaacaucaagaagggcccggcgcccuucuacccgcuggaggacgggaccgccggcgagcagcuccacaaggccaugaagcgguacgcccuggugccgggcacgaucgccuucaccgacgcccacaucgaggucgacaucaccuacgcggaguacuucgagaugagcgugcgccuggccgaggccaugaagcgguacggccugaacaccaaccaccggaucguggugugcucggagaacagccugcaguucuucaugccggugcugggcgcccucuucaucggcguggccgucgccccggcgaacgacaucuacaacgagcgggagcugcugaacagcauggggaucagccagccgaccgugguguucgugagcaagaagggccugcagaagauccugaacgugcagaagaagcugcccaucauccagaagaucaucaucauggacagcaagaccgacuaccagggcuuccagucgauguacacguucgugaccagccaccucccgccgggcuucaacgaguacgacuucgucccggagagcuucgaccgggacaagaccaucgcccugaucaugaacagcagcggcagcaccggccugccgaaggggguggcccugccgcaccggaccgccugcgugcgcuucucgcacgcccgggaccccaucuucggcaaccagaucaucccggacaccgccauccugagcguggugccguuccaccacggcuucggcauguucacgacccugggcuaccucaucugcggcuuccgggugguccugauguaccgguucgaggaggagcuguuccugcggagccugcaggacuacaagauccagagcgcgcugcucgugccgacccuguucagcuucuucgccaagagcacccugaucgacaaguacgaccugucgaaccugcacgagaucgccagcgggggcgccccgcugagcaaggaggugggcgaggccguggccaagcgguuccaccucccgggcauccgccagggcuacggccugaccgagaccacgagcgcgauccugaucacccccgagggggacgacaagccgggcgccgugggcaagguggucccguucuucgaggccaaggugguggaccuggacaccggcaagacccugggcgugaaccagcggggcgagcugugcgugcgggggccgaugaucaugagcggcuacgugaacaacccggaggccaccaacgcccucaucgacaaggacggcuggcugcacagcggcgacaucgccuacugggacgaggacgagcacuucuucaucgucgaccggcugaagucgcugaucaaguacaagggcuaccagguggcgccggccgagcuggagagcauccugcuccagcaccccaacaucuucgacgccggcguggccgggcugccggacgacgacgccggcgagcugccggccgcggugguggugcuggagcacggcaagaccaugacggagaaggagaucgucgacuacguggccagccaggugaccaccgccaagaagcugcggggcggcgugguguucguggacgaggucccgaagggccugaccgggaagcucgacgcccggaagauccgcgagauccugaucaaggccaagaagggcggcaagaucgccgugugaggacuaguaauaaggaaacuguaugaaugucugugggcaggaagugaagagauccuucuguaaagguuuuuggaauuaugucugcugaauaauaaacuuuuuugaaauaauaaaucugguagaaaaaugagaucuaaaaaaaaaaaaaaaaaaaaaaaaaaaaaaaaaaaaaaaaaaaaaaaaaaaaaaaaaaaaaaaagaauu

SEQ ID NO: 242 - RNA, 2048 nt, Artificial Sequence
  mRNA product Nosip_protein of interest example 5_CASP1_A64-C30-histoneSL
  misc_feature (124)..(1785): n is a, c, g, or u
gggagacuccugucgggcggaaguaggaggaguagaguuuaaaaacaguacucuuuuuccgguucgggacguaguugaagcaacgacaagccggauaaccgcucuugagacaggaagcuuaccnnnnnnnnnnnnnnnnnnnnnnnnnnnnnnnnnnnnnnnnnnnnnnnnnnnnnnnnnnnnnnnnnnnnnnnnnnnnnnnnnnnnnnnnnnnnnnnnnnnnnnnnnnnnnnnnnnnnnnnnnnnnnnnnnnnnnnnnnnnnnnnnnnnnnnnnnnnnnnnnnnnnnnnnnnnnnnnnnnnnnnnnnnnnnnnnnnnnnnnnnnnnnnnnnnnnnnnnnnnnnnnnnnnnnnnnnnnnnnnnnnnnnnnnnnnnnnnnnnnnnnnnnnnnnnnnnnnnnnnnnnnnnnnnnnnnnnnnnnnnnnnnnnnnnnnnnnnnnnnnnnnnnnnnnnnnnnnnnnnnnnnnnnnnnnnnnnnnnnnnnnnnnnnnnnnnnnnnnnnnnnnnnnnnnnnnnnnnnnnnnnnnnnnnnnnnnnnnnnnnnnnnnnnnnnnnnnnnnnnnnnnnnnnnnnnnnnnnnnnnnnnnnnnnnnnnnnnnnnnnnnnnnnnnnnnnnnnnnnnnnnnnnnnnnnnnnnnnnnnnnnnnnnnnnnnnnnnnnnnnnnnnnnnnnnnnnnnnnnnnnnnnnnnnnnnnnnnnnnnnnnnnnnnnnnnnnnnnnnnnnnnnnnnnnnnnnnnnnnnnnnnnnnnnnnnnnnnnnnnnnnnnnnnnnnnnnnnnnnnnnnnnnnnnnnnnnnnnnnnnnnnnnnnnnnnnnnnnnnnnnnnnnnnnnnnnnnnnnnnnnnnnnnnnnnnnnnnnnnnnnnnnnnnnnnnnnnnnnnnnnnnnnnnnnnnnnnnnnnnnnnnnnnnnnnnnnnnnnnnnnnnnnnnnnnnnnnnnnnnnnnnnnnnnnnnnnnnnnnnnnnnnnnnnnnnnnnnnnnnnnnnnnnnnnnnnnnnnnnnnnnnnnnnnnnnnnnnnnnnnnnnnnnnnnnnnnnnnnnnnnnnnnnnnnnnnnnnnnnnnnnnnnnnnnnnnnnnnnnnnnnnnnnnnnnnnnnnnnnnnnnnnnnnnnnnnnnnnnnnnnnnnnnnnnnnnnnnnnnnnnnnnnnnnnnnnnnnnnnnnnnnnnnnnnnnnnnnnnnnnnnnnnnnnnnnnnnnnnnnnnnnnnnnnnnnnnnnnnnnnnnnnnnnnnnnnnnnnnnnnnnnnnnnnnnnnnnnnnnnnnnnnnnnnnnnnnnnnnnnnnnnnnnnnnnnnnnnnnnnnnnnnnnnnnnnnnnnnnnnnnnnnnnnnnnnnnnnnnnnnnnnnnnnnnnnnnnnnnnnnnnnnnnnnnnnnnnnnnnnnnnnnnnnnnnnnnnnnnnnnnnnnnnnnnnnnnnnnnnnnnnnnnnnnnnnnnnnnnnnnnnnnnnnnnnnnnnnnnnnnnnnnnnnnnnnnnnnnnnnnnnnnnnnnnnnnnnnnnnnnnnnnnnnnnnnnnnnnnnnnnnnnnnnnnnnnnnnnnnnnnnnnnnnnnnnnnnnnnnnnnnnnnnnnnnnnnnnnnnnnnnnnnnnnnnnnnnnnnnnnnnnnnnnnnnnnnnnnnnnnnnnnnnnnnnnnnnnnnnnnnnnnnnnnnnnnnnnnnnnnnnnnnnnnnnnnnnnnnnnnnnnnnnnnnnnnnnnnnnnnnnnnnnnnnnnnnnnnnnnnnnnnnnnnnnnnnnnnnnnnnnnnnnnnnnnnnnnnnnnnnnnnnnnnnnnnnnnnnnnnnnggacuaguaauaaggaaacuguaugaaugucugugggcaggaagugaagagauccuucuguaaagguuuuuggaauuaugucugcugaauaauaaacuuuuuugaaauaauaaaucugguagaaaaaugagaucuaaaaaaaaaaaaaaaaaaaaaaaaaaaaaaaaaaaaaaaaaaaaaaaaaaaaaaaaaaaaaaaaugcaucccccccccccccccccccccccccccccccaaaggcucuuuucagagccaccagaauu

SEQ ID NO: 243 - RNA, 1977 nt, Artificial Sequence
  mRNA product Nosip_RAV-G(GC)_COX6B1_A64-C30-histoneSL
gggagacuccugucgggcggaaguaggaggaguagaguuuaaaaacaguacucuuuuuccgguucgggacguaguugaagcaacgacaagccggauaaccgcucuugagacaggaagcuuaccauggugccccaggcccuccuguucgucccgcugcugguguucccccucugcuucggcaaguuccccaucuacaccauccccgacaagcuggggccguggagccccaucgacauccaccaccuguccugccccaacaaccucguggucgaggacgagggcugcaccaaccugagcggguucuccuacauggagcugaaggugggcuacaucagcgccaucaagaugaacggguucacgugcaccggcguggucaccgaggcggagaccuacacgaacuucgugggcuacgugaccaccaccuucaagcggaagcacuuccgccccacgccggacgccugccgggccgccuacaacuggaagauggccggggacccccgcuacgaggagucccuccacaaccccuaccccgacuaccacuggcugcggaccgucaagaccaccaaggagagccuggugaucaucuccccgagcguggcggaccucgaccccuacgaccgcucccugcacagccgggucuuccccggcgggaacugcuccggcguggccgugagcuccacguacugcagcaccaaccacgacuacaccaucuggaugcccgagaacccgcgccuggggauguccugcgacaucuucaccaacagccggggcaagcgcgccuccaagggcagcgagacgugcggguucgucgacgagcggggccucuacaagucccugaagggggccugcaagcugaagcucugcggcgugcugggccugcgccucauggacgggaccuggguggcgaugcagaccagcaacgagaccaaguggugcccccccggccagcuggucaaccugcacgacuuccggagcgacgagaucgagcaccucgugguggaggagcuggucaagaagcgcgaggagugccuggacgcccucgaguccaucaugacgaccaagagcguguccuuccggcgccugagccaccuccggaagcuggugcccggguucggcaaggccuacaccaucuucaacaagacccugauggaggccgacgcccacuacaaguccguccgcacguggaacgagaucaucccgagcaaggggugccugcgggugggcggccgcugccacccccacgucaacgggguguucuucaacggcaucauccucgggcccgacggcaacgugcugauccccgagaugcaguccagccugcuccagcagcacauggagcugcuggucuccagcgugaucccgcucaugcacccccuggcggaccccuccaccguguucaagaacggggacgaggccgaggacuucgucgaggugcaccuccccgacgugcacgagcggaucagcggcgucgaccugggccugccgaacugggggaaguacgugcugcucuccgccggcgcccugaccgcccugaugcugaucaucuuccucaugaccugcuggcgccgggugaaccggagcgagcccacgcagcacaaccugcgcgggaccggccgggaggucuccgugaccccgcagagcgggaagaucaucuccagcugggaguccuacaagagcggcggcgagaccgggcugugaggacuaguacuggcugcaucucccuuuccucuguccuccauccuucucccaggauggugaagggggaccugguacccagugauccccaccccaggauccuaaaucaugacuuaccugcuaauaaaaacucauuggaaaagugagaagaucuaaaaaaaaaaaaaaaaaaaaaaaaaaaaaaaaaaaaaaaaaaaaaaaaaaaaaaaaaaaaaaaaugcaucccccccccccccccccccccccccccccccaaaggcucuuuucagagccaccagaauu

SEQ ID NO: 244 - RNA, 1918 nt, Artificial Sequence
  mRNA product Nosip_RAV-G(GC)_COX6B1_A64
gggagacuccugucgggcggaaguaggaggaguagaguuuaaaaacaguacucuuuuuccgguucgggacguaguugaagcaacgacaagccggauaaccgcucuugagacaggaagcuuaccauggugccccaggcccuccuguucgucccgcugcugguguucccccucugcuucggcaaguuccccaucuacaccauccccgacaagcuggggccguggagccccaucgacauccaccaccuguccugccccaacaaccucguggucgaggacgagggcugcaccaaccugagcggguucuccuacauggagcugaaggugggcuacaucagcgccaucaagaugaacggguucacgugcaccggcguggucaccgaggcggagaccuacacgaacuucgugggcuacgugaccaccaccuucaagcggaagcacuuccgccccacgccggacgccugccgggccgccuacaacuggaagauggccggggacccccgcuacgaggagucccuccacaaccccuaccccgacuaccacuggcugcggaccgucaagaccaccaaggagagccuggugaucaucuccccgagcguggcggaccucgaccccuacgaccgcucccugcacagccgggucuuccccggcgggaacugcuccggcguggccgugagcuccacguacugcagcaccaaccacgacuacaccaucuggaugcccgagaacccgcgccuggggauguccugcgacaucuucaccaacagccggggcaagcgcgccuccaagggcagcgagacgugcggguucgucgacgagcggggccucuacaagucccugaagggggccugcaagcugaagcucugcggcgugcugggccugcgccucauggacgggaccuggguggcgaugcagaccagcaacgagaccaaguggugcccccccggccagcuggucaaccugcacgacuuccggagcgacgagaucgagcaccucgugguggaggagcuggucaagaagcgcgaggagugccuggacgcccucgaguccaucaugacgaccaagagcguguccuuccggcgccugagccaccuccggaagcuggugcccggguucggcaaggccuacaccaucuucaacaagacccugauggaggccgacgcccacuacaaguccguccgcacguggaacgagaucaucccgagcaaggggugccugcgggugggcggccgcugccacccccacgucaacgggguguucuucaacggcaucauccucgggcccgacggcaacgugcugauccccgagaugcaguccagccugcuccagcagcacauggagcugcuggucuccagcgugaucccgcucaugcacccccuggcggaccccuccaccguguucaagaacggggacgaggccgaggacuucgucgaggugcaccuccccgacgugcacgagcggaucagcggcgucgaccugggccugccgaacugggggaaguacgugcugcucuccgccggcgcccugaccgcccugaugcugaucaucuuccucaugaccugcuggcgccgggugaaccggagcgagcccacgcagcacaaccugcgcgggaccggccgggaggucuccgugaccccgcagagcgggaagaucaucuccagcugggaguccuacaagagcggcggcgagaccgggcugugaggacuaguacuggcugcaucucccuuuccucuguccuccauccuucucccaggauggugaagggggaccugguacccagugauccccaccccaggauccuaaaucaugacuuaccugcuaauaaaaacucauuggaaaagugagaagaucuaaaaaaaaaaaaaaaaaaaaaaaaaaaaaaaaaaaaaaaaaaaaaaaaaaaaaaaaaaaaaaaagaauu

SEQ ID NO: 245 - RNA, 984 nt, Artificial Sequence
  mRNA product Nosip_HsEPO(GC)_COX6B1_A64-C30-histoneSL
gggagacuccugucgggcggaaguaggaggaguagaguuuaaaaacaguacucuuuuuccgguucgggacguaguugaagcaacgacaagccggauaaccgcucuugagacaggaagcuuaccaugggcgugcacgagugccccgccuggcuguggcuccugcugagccuccugucccugccgcucgggcugcccguccugggcgcccccccgcggcucaucugcgacagccgcgugcuggagcgguaccugcucgaggcgaaggaggccgagaacaucaccaccgggugcgccgagcacugcucccugaacgagaacaucacggugccggacaccaaggucaacuucuacgccuggaagcgcauggaggugggccagcaggccguggaggucuggcaggggcuggcgcuccugagcgaggccgugcugcggggccaggcccuccuggugaacuccagccagcccugggagccccugcagcuccacgucgacaaggccguguccggccugcgcagccugaccacccuccugcgggcgcugggggcccagaaggaggccaucucccccccggacgccgccagcgcggccccgcuccgcacgaucaccgccgacaccuuccggaagcuguuccgcguguacuccaacuuccugcggggcaagcucaagcuguacaccggggaggccugccgcacgggcgaccggugaggacuaguacuggcugcaucucccuuuccucuguccuccauccuucucccaggauggugaagggggaccugguacccagugauccccaccccaggauccuaaaucaugacuuaccugcuaauaaaaacucauuggaaaagugagaagaucuaaaaaaaaaaaaaaaaaaaaaaaaaaaaaaaaaaaaaaaaaaaaaaaaaaaaaaaaaaaaaaaaugcaucccccccccccccccccccccccccccccccaaaggcucuuuucagagccaccagaauu

SEQ ID NO: 246 - RNA, 925 nt, Artificial Sequence
  mRNA product Nosip_HsEPO(GC)_COX6B1_A64
gggagacuccugucgggcggaaguaggaggaguagaguuuaaaaacaguacucuuuuuccgguucgggacguaguugaagcaacgacaagccggauaaccgcucuugagacaggaagcuuaccaugggcgugcacgagugccccgccuggcuguggcuccugcugagccuccugucccugccgcucgggcugcccguccugggcgcccccccgcggcucaucugcgacagccgcgugcuggagcgguaccugcucgaggcgaaggaggccgagaacaucaccaccgggugcgccgagcacugcucccugaacgagaacaucacggugccggacaccaaggucaacuucuacgccuggaagcgcauggaggugggccagcaggccguggaggucuggcaggggcuggcgcuccugagcgaggccgugcugcggggccaggcccuccuggugaacuccagccagcccugggagccccugcagcuccacgucgacaaggccguguccggccugcgcagccugaccacccuccugcgggcgcugggggcccagaaggaggccaucucccccccggacgccgccagcgcggccccgcuccgcacgaucaccgccgacaccuuccggaagcuguuccgcguguacuccaacuuccugcggggcaagcucaagcuguacaccggggaggccugccgcacgggcgaccggugaggacuaguacuggcugcaucucccuuuccucuguccuccauccuucucccaggauggugaagggggaccugguacccagugauccccaccccaggauccuaaaucaugacuuaccugcuaauaaaaacucauuggaaaagugagaagaucuaaaaaaaaaaaaaaaaaaaaaaaaaaaaaaaaaaaaaaaaaaaaaaaaaaaaaaaaaaaaaaaagaauu

SEQ ID NO: 247 - RNA, 2055 nt, Artificial Sequence
  mRNA product Nosip_PpLuc(GC)_COX6B1_A64-C30-histoneSL
gggagacuccugucgggcggaaguaggaggaguagaguuuaaaaacaguacucuuuuuccgguucgggacguaguugaagcaacgacaagccggauaaccgcucuugagacaggaagcuuaccauggaggacgccaagaacaucaagaagggcccggcgcccuucuacccgcuggaggacgggaccgccggcgagcagcuccacaaggccaugaagcgguacgcccuggugccgggcacgaucgccuucaccgacgcccacaucgaggucgacaucaccuacgcggaguacuucgagaugagcgugcgccuggccgaggccaugaagcgguacggccugaacaccaaccaccggaucguggugugcucggagaacagccugcaguucuucaugccggugcugggcgcccucuucaucggcguggccgucgccccggcgaacgacaucuacaacgagcgggagcugcugaacagcauggggaucagccagccgaccgugguguucgugagcaagaagggccugcagaagauccugaacgugcagaagaagcugcccaucauccagaagaucaucaucauggacagcaagaccgacuaccagggcuuccagucgauguacacguucgugaccagccaccucccgccgggcuucaacgaguacgacuucgucccggagagcuucgaccgggacaagaccaucgcccugaucaugaacagcagcggcagcaccggccugccgaaggggguggcccugccgcaccggaccgccugcgugcgcuucucgcacgcccgggaccccaucuucggcaaccagaucaucccggacaccgccauccugagcguggugccguuccaccacggcuucggcauguucacgacccugggcuaccucaucugcggcuuccgggugguccugauguaccgguucgaggaggagcuguuccugcggagccugcaggacuacaagauccagagcgcgcugcucgugccgacccuguucagcuucuucgccaagagcacccugaucgacaaguacgaccugucgaaccugcacgagaucgccagcgggggcgccccgcugagcaaggaggugggcgaggccguggccaagcgguuccaccucccgggcauccgccagggcuacggccugaccgagaccacgagcgcgauccugaucacccccgagggggacgacaagccgggcgccgugggcaagguggucccguucuucgaggccaaggugguggaccuggacaccggcaagacccugggcgugaaccagcggggcgagcugugcgugcgggggccgaugaucaugagcggcuacgugaacaacccggaggccaccaacgcccucaucgacaaggacggcuggcugcacagcggcgacaucgccuacugggacgaggacgagcacuucuucaucgucgaccggcugaagucgcugaucaaguacaagggcuaccagguggcgccggccgagcuggagagcauccugcuccagcaccccaacaucuucgacgccggcguggccgggcugccggacgacgacgccggcgagcugccggccgcggugguggugcuggagcacggcaagaccaugacggagaaggagaucgucgacuacguggccagccaggugaccaccgccaagaagcugcggggcggcgugguguucguggacgaggucccgaagggccugaccgggaagcucgacgcccggaagauccgcgagauccugaucaaggccaagaagggcggcaagaucgccgugugaggacuaguacuggcugcaucucccuuuccucuguccuccauccuucucccaggauggugaagggggaccugguacccagugauccccaccccaggauccuaaaucaugacuuaccugcuaauaaaaacucauuggaaaagugagaagaucuaaaaaaaaaaaaaaaaaaaaaaaaaaaaaaaaaaaaaaaaaaaaaaaaaaaaaaaaaaaaaaaaugcaucccccccccccccccccccccccccccccccaaaggcucuuuucagagccaccagaauu

SEQ ID NO: 248 - RNA, 1996 nt, Artificial Sequence
  mRNA product Nosip_PpLuc(GC)_COX6B1_A64
gggagacuccugucgggcggaaguaggaggaguagaguuuaaaaacaguacucuuuuuccgguucgggacguaguugaagcaacgacaagccggauaaccgcucuugagacaggaagcuuaccauggaggacgccaagaacaucaagaagggcccggcgcccuucuacccgcuggaggacgggaccgccggcgagcagcuccacaaggccaugaagcgguacgcccuggugccgggcacgaucgccuucaccgacgcccacaucgaggucgacaucaccuacgcggaguacuucgagaugagcgugcgccuggccgaggccaugaagcgguacggccugaacaccaaccaccggaucguggugugcucggagaacagccugcaguucuucaugccggugcugggcgcccucuucaucggcguggccgucgccccggcgaacgacaucuacaacgagcgggagcugcugaacagcauggggaucagccagccgaccgugguguucgugagcaagaagggccugcagaagauccugaacgugcagaagaagcugcccaucauccagaagaucaucaucauggacagcaagaccgacuaccagggcuuccagucgauguacacguucgugaccagccaccucccgccgggcuucaacgaguacgacuucgucccggagagcuucgaccgggacaagaccaucgcccugaucaugaacagcagcggcagcaccggccugccgaaggggguggcccugccgcaccggaccgccugcgugcgcuucucgcacgcccgggaccccaucuucggcaaccagaucaucccggacaccgccauccugagcguggugccguuccaccacggcuucggcauguucacgacccugggcuaccucaucugcggcuuccgggugguccugauguaccgguucgaggaggagcuguuccugcggagccugcaggacuacaagauccagagcgcgcugcucgugccgacccuguucagcuucuucgccaagagcacccugaucgacaaguacgaccugucgaaccugcacgagaucgccagcgggggcgccccgcugagcaaggaggugggcgaggccguggccaagcgguuccaccucccgggcauccgccagggcuacggccugaccgagaccacgagcgcgauccugaucacccccgagggggacgacaagccgggcgccgugggcaagguggucccguucuucgaggccaaggugguggaccuggacaccggcaagacccugggcgugaaccagcggggcgagcugugcgugcgggggccgaugaucaugagcggcuacgugaacaacccggaggccaccaacgcccucaucgacaaggacggcuggcugcacagcggcgacaucgccuacugggacgaggacgagcacuucuucaucgucgaccggcugaagucgcugaucaaguacaagggcuaccagguggcgccggccgagcuggagagcauccugcuccagcaccccaacaucuucgacgccggcguggccgggcugccggacgacgacgccggcgagcugccggccgcggugguggugcuggagcacggcaagaccaugacggagaaggagaucgucgacuacguggccagccaggugaccaccgccaagaagcugcggggcggcgugguguucguggacgaggucccgaagggccugaccgggaagcucgacgcccggaagauccgcgagauccugaucaaggccaagaagggcggcaagaucgccgugugaggacuaguacuggcugcaucucccuuuccucuguccuccauccuucucccaggauggugaagggggaccugguacccagugauccccaccccaggauccuaaaucaugacuuaccugcuaauaaaaacucauuggaaaagugagaagaucuaaaaaaaaaaaaaaaaaaaaaaaaaaaaaaaaaaaaaaaaaaaaaaaaaaaaaaaaaaaaaaaagaauu

SEQ ID NO: 249 - RNA, 2064 nt, Artificial Sequence
  mRNA product Nosip_protein of interest example 5_COX6B1_A64-C30-histoneSL
  misc_feature (124)..(1785): n is a, c, g, or u
gggagacuccugucgggcggaaguaggaggaguagaguuuaaaaacaguacucuuuuuccgguucgggacguaguugaagcaacgacaagccggauaaccgcucuugagacaggaagcuuaccnnnnnnnnnnnnnnnnnnnnnnnnnnnnnnnnnnnnnnnnnnnnnnnnnnnnnnnnnnnnnnnnnnnnnnnnnnnnnnnnnnnnnnnnnnnnnnnnnnnnnnnnnnnnnnnnnnnnnnnnnnnnnnnnnnnnnnnnnnnnnnnnnnnnnnnnnnnnnnnnnnnnnnnnnnnnnnnnnnnnnnnnnnnnnnnnnnnnnnnnnnnnnnnnnnnnnnnnnnnnnnnnnnnnnnnnnnnnnnnnnnnnnnnnnnnnnnnnnnnnnnnnnnnnnnnnnnnnnnnnnnnnnnnnnnnnnnnnnnnnnnnnnnnnnnnnnnnnnnnnnnnnnnnnnnnnnnnnnnnnnnnnnnnnnnnnnnnnnnnnnnnnnnnnnnnnnnnnnnnnnnnnnnnnnnnnnnnnnnnnnnnnnnnnnnnnnnnnnnnnnnnnnnnnnnnnnnnnnnnnnnnnnnnnnnnnnnnnnnnnnnnnnnnnnnnnnnnnnnnnnnnnnnnnnnnnnnnnnnnnnnnnnnnnnnnnnnnnnnnnnnnnnnnnnnnnnnnnnnnnnnnnnnnnnnnnnnnnnnnnnnnnnnnnnnnnnnnnnnnnnnnnnnnnnnnnnnnnnnnnnnnnnnnnnnnnnnnnnnnnnnnnnnnnnnnnnnnnnnnnnnnnnnnnnnnnnnnnnnnnnnnnnnnnnnnnnnnnnnnnnnnnnnnnnnnnnnnnnnnnnnnnnnnnnnnnnnnnnnnnnnnnnnnnnnnnnnnnnnnnnnnnnnnnnnnnnnnnnnnnnnnnnnnnnnnnnnnnnnnnnnnnnnnnnnnnnnnnnnnnnnnnnnnnnnnnnnnnnnnnnnnnnnnnnnnnnnnnnnnnnnnnnnnnnnnnnnnnnnnnnnnnnnnnnnnnnnnnnnnnnnnnnnnnnnnnnnnnnnnnnnnnnnnnnnnnnnnnnnnnnnnnnnnnnnnnnnnnnnnnnnnnnnnnnnnnnnnnnnnnnnnnnnnnnnnnnnnnnnnnnnnnnnnnnnnnnnnnnnnnnnnnnnnnnnnnnnnnnnnnnnnnnnnnnnnnnnnnnnnnnnnnnnnnnnnnnnnnnnnnnnnnnnnnnnnnnnnnnnnnnnnnnnnnnnnnnnnnnnnnnnnnnnnnnnnnnnnnnnnnnnnnnnnnnnnnnnnnnnnnnnnnnnnnnnnnnnnnnnnnnnnnnnnnnnnnnnnnnnnnnnnnnnnnnnnnnnnnnnnnnnnnnnnnnnnnnnnnnnnnnnnnnnnnnnnnnnnnnnnnnnnnnnnnnnnnnnnnnnnnnnnnnnnnnnnnnnnnnnnnnnnnnnnnnnnnnnnnnnnnnnnnnnnnnnnnnnnnnnnnnnnnnnnnnnnnnnnnnnnnnnnnnnnnnnnnnnnnnnnnnnnnnnnnnnnnnnnnnnnnnnnnnnnnnnnnnnnnnnnnnnnnnnnnnnnnnnnnnnnnnnnnnnnnnnnnnnnnnnnnnnnnnnnnnnnnnnnnnnnnnnnnnnnnnnnnnnnnnnnnnnnnnnnnnnnnnnnnnnnnnnnnnnnnnnnnnnnnnnnnnnnnnnnnnnnnnnnnnnnnnnnnnnnnnnnnnnnnnnnnnnnnnnnnnnnnnnnnnnnnnnnnnnnnnnnnnnnnnnnnnnnnnnnnnnnnnnnnnnnnnnnnnnnnnnnnnnnnnnnnnnnnnnnnnnnnnnnnnnnnnnggacuaguacuggcugcaucucccuuuccucuguccuccauccuucucccaggauggugaagggggaccugguacccagugauccccaccccaggauccuaaaucaugacuuaccugcuaauaaaaacucauuggaaaagugagaagaucuaaaaaaaaaaaaaaaaaaaaaaaaaaaaaaaaaaaaaaaaaaaaaaaaaaaaaaaaaaaaaaaaugcaucccccccccccccccccccccccccccccccaaaggcucuuuucagagccaccagaauu

SEQ ID NO: 250 - RNA, 2193 nt, Artificial Sequence
  mRNA product Nosip_RAV-G(GC)_Gnas_A64-C30-histoneSL
gggagacuccugucgggcggaaguaggaggaguagaguuuaaaaacaguacucuuuuuccgguucgggacguaguugaagcaacgacaagccggauaaccgcucuugagacaggaagcuuaccauggugccccaggcccuccuguucgucccgcugcugguguucccccucugcuucggcaaguuccccaucuacaccauccccgacaagcuggggccguggagccccaucgacauccaccaccuguccugccccaacaaccucguggucgaggacgagggcugcaccaaccugagcggguucuccuacauggagcugaaggugggcuacaucagcgccaucaagaugaacggguucacgugcaccggcguggucaccgaggcggagaccuacacgaacuucgugggcuacgugaccaccaccuucaagcggaagcacuuccgccccacgccggacgccugccgggccgccuacaacuggaagauggccggggacccccgcuacgaggagucccuccacaaccccuaccccgacuaccacuggcugcggaccgucaagaccaccaaggagagccuggugaucaucuccccgagcguggcggaccucgaccccuacgaccgcucccugcacagccgggucuuccccggcgggaacugcuccggcguggccgugagcuccacguacugcagcaccaaccacgacuacaccaucuggaugcccgagaacccgcgccuggggauguccugcgacaucuucaccaacagccggggcaagcgcgccuccaagggcagcgagacgugcggguucgucgacgagcggggccucuacaagucccugaagggggccugcaagcugaagcucugcggcgugcugggccugcgccucauggacgggaccuggguggcgaugcagaccagcaacgagaccaaguggugcccccccggccagcuggucaaccugcacgacuuccggagcgacgagaucgagcaccucgugguggaggagcuggucaagaagcgcgaggagugccuggacgcccucgaguccaucaugacgaccaagagcguguccuuccggcgccugagccaccuccggaagcuggugcccggguucggcaaggccuacaccaucuucaacaagacccugauggaggccgacgcccacuacaaguccguccgcacguggaacgagaucaucccgagcaaggggugccugcgggugggcggccgcugccacccccacgucaacgggguguucuucaacggcaucauccucgggcccgacggcaacgugcugauccccgagaugcaguccagccugcuccagcagcacauggagcugcuggucuccagcgugaucccgcucaugcacccccuggcggaccccuccaccguguucaagaacggggacgaggccgaggacuucgucgaggugcaccuccccgacgugcacgagcggaucagcggcgucgaccugggccugccgaacugggggaaguacgugcugcucuccgccggcgcccugaccgcccugaugcugaucaucuuccucaugaccugcuggcgccgggugaaccggagcgagcccacgcagcacaaccugcgcgggaccggccgggaggucuccgugaccccgcagagcgggaagaucaucuccagcugggaguccuacaagagcggcggcgagaccgggcugugaggacuagugaagggaacacccaaauuuaauucagccuuaagcacaauuaauuaagagugaaacguaauuguacaagcaguuggucacccaccauagggcaugaucaacaccgcaaccuuuccuuuuucccccagugauucugaaaaaccccucuucccuucagcuugcuuagauguuccaaauuuaguaagcuuaaggcggccuacagaagaaaaagaaaaaaaaggccacaaaaguucccucucacuuucaguaaauaaaauaaaagcagcaacagaaauaaagaaauaaaugaaauucaaaaugaaauaaauauuguguugugcagcauuaaaaaaucaauaaaaauuaaaaaugagcaagaucuaaaaaaaaaaaaaaaaaaaaaaaaaaaaaaaaaaaaaaaaaaaaaaaaaaaaaaaaaaaaaaaaugcaucccccccccccccccccccccccccccccccaaaggcucuuuucagagccaccagaauu

SEQ ID NO: 251 - RNA, 2134 nt, Artificial Sequence
  mRNA product Nosip_RAV-G(GC)_Gnas_A64
gggagacuccugucgggcggaaguaggaggaguagaguuuaaaaacaguacucuuuuuccgguucgggacguaguugaagcaacgacaagccggauaaccgcucuugagacaggaagcuuaccauggugccccaggcccuccuguucgucccgcugcugguguucccccucugcuucggcaaguuccccaucuacaccauccccgacaagcuggggccguggagccccaucgacauccaccaccuguccugccccaacaaccucguggucgaggacgagggcugcaccaaccugagcggguucuccuacauggagcugaaggugggcuacaucagcgccaucaagaugaacggguucacgugcaccggcguggucaccgaggcggagaccuacacgaacuucgugggcuacgugaccaccaccuucaagcggaagcacuuccgccccacgccggacgccugccgggccgccuacaacuggaagauggccggggacccccgcuacgaggagucccuccacaaccccuaccccgacuaccacuggcugcggaccgucaagaccaccaaggagagccuggugaucaucuccccgagcguggcggaccucgaccccuacgaccgcucccugcacagccgggucuuccccggcgggaacugcuccggcguggccgugagcuccacguacugcagcaccaaccacgacuacaccaucuggaugcccgagaacccgcgccuggggauguccugcgacaucuucaccaacagccggggcaagcgcgccuccaagggcagcgagacgugcggguucgucgacgagcggggccucuacaagucccugaagggggccugcaagcugaagcucugcggcgugcugggccugcgccucauggacgggaccuggguggcgaugcagaccagcaacgagaccaaguggugcccccccggccagcuggucaaccugcacgacuuccggagcgacgagaucgagcaccucgugguggaggagcuggucaagaagcgcgaggagugccuggacgcccucgaguccaucaugacgaccaagagcguguccuuccggcgccugagccaccuccggaagcuggugcccggguucggcaaggccuacaccaucuucaacaagacccugauggaggccgacgcccacuacaaguccguccgcacguggaacgagaucaucccgagcaaggggugccugcgggugggcggccgcugccacccccacgucaacgggguguucuucaacggcaucauccucgggcccgacggcaacgugcugauccccgagaugcaguccagccugcuccagcagcacauggagcugcuggucuccagcgugaucccgcucaugcacccccuggcggaccccuccaccguguucaagaacggggacgaggccgaggacuucgucgaggugcaccuccccgacgugcacgagcggaucagcggcgucgaccugggccugccgaacugggggaaguacgugcugcucuccgccggcgcccugaccgcccugaugcugaucaucuuccucaugaccugcuggcgccgggugaaccggagcgagcccacgcagcacaaccugcgcgggaccggccgggaggucuccgugaccccgcagagcgggaagaucaucuccagcugggaguccuacaagagcggcggcgagaccgggcugugaggacuagugaagggaacacccaaauuuaauucagccuuaagcacaauuaauuaagagugaaacguaauuguacaagcaguuggucacccaccauagggcaugaucaacaccgcaaccuuuccuuuuucccccagugauucugaaaaaccccucuucccuucagcuugcuuagauguuccaaauuuaguaagcuuaaggcggccuacagaagaaaaagaaaaaaaaggccacaaaaguucccucucacuuucaguaaauaaaauaaaagcagcaacagaaauaaagaaauaaaugaaauucaaaaugaaauaaauauuguguugugcagcauuaaaaaaucaauaaaaauuaaaaaugagcaagaucuaaaaaaaaaaaaaaaaaaaaaaaaaaaaaaaaaaaaaaaaaaaaaaaaaaaaaaaaaaaaaaaagaauu

SEQ ID NO: 252 - RNA, 1200 nt, Artificial Sequence
  mRNA product Nosip_HsEPO(GC)_Gnas_A64-C30-histoneSL
gggagacuccugucgggcggaaguaggaggaguagaguuuaaaaacaguacucuuuuuccgguucgggacguaguugaagcaacgacaagccggauaaccgcucuugagacaggaagcuuaccaugggcgugcacgagugccccgccuggcuguggcuccugcugagccuccugucccugccgcucgggcugcccguccugggcgcccccccgcggcucaucugcgacagccgcgugcuggagcgguaccugcucgaggcgaaggaggccgagaacaucaccaccgggugcgccgagcacugcucccugaacgagaacaucacggugccggacaccaaggucaacuucuacgccuggaagcgcauggaggugggccagcaggccguggaggucuggcaggggcuggcgcuccugagcgaggccgugcugcggggccaggcccuccuggugaacuccagccagcccugggagccccugcagcuccacgucgacaaggccguguccggccugcgcagccugaccacccuccugcgggcgcugggggcccagaaggaggccaucucccccccggacgccgccagcgcggccccgcuccgcacgaucaccgccgacaccuuccggaagcuguuccgcguguacuccaacuuccugcggggcaagcucaagcuguacaccggggaggccugccgcacgggcgaccggugaggacuagugaagggaacacccaaauuuaauucagccuuaagcacaauuaauuaagagugaaacguaauuguacaagcaguuggucacccaccauagggcaugaucaacaccgcaaccuuuccuuuuucccccagugauucugaaaaaccccucuucccuucagcuugcuuagauguuccaaauuuaguaagcuuaaggcggccuacagaagaaaaagaaaaaaaaggccacaaaaguucccucucacuuucaguaaauaaaauaaaagcagcaacagaaauaaagaaauaaaugaaauucaaaaugaaauaaauauuguguugugcagcauuaaaaaaucaauaaaaauuaaaaaugagcaagaucuaaaaaaaaaaaaaaaaaaaaaaaaaaaaaaaaaaaaaaaaaaaaaaaaaaaaaaaaaaaaaaaaugcaucccccccccccccccccccccccccccccccaaaggcucuuuucagagccaccagaauu

SEQ ID NO: 253 - RNA, 1141 nt, Artificial Sequence
  mRNA product Nosip_HsEPO(GC)_Gnas_A64
gggagacuccugucgggcggaaguaggaggaguagaguuuaaaaacaguacucuuuuuccgguucgggacguaguugaagcaacgacaagccggauaaccgcucuugagacaggaagcuuaccaugggcgugcacgagugccccgccuggcuguggcuccugcugagccuccugucccugccgcucgggcugcccguccugggcgcccccccgcggcucaucugcgacagccgcgugcuggagcgguaccugcucgaggcgaaggaggccgagaacaucaccaccgggugcgccgagcacugcucccugaacgagaacaucacggugccggacaccaaggucaacuucuacgccuggaagcgcauggaggugggccagcaggccguggaggucuggcaggggcuggcgcuccugagcgaggccgugcugcggggccaggcccuccuggugaacuccagccagcccugggagccccugcagcuccacgucgacaaggccguguccggccugcgcagccugaccacccuccugcgggcgcugggggcccagaaggaggccaucucccccccggacgccgccagcgcggccccgcuccgcacgaucaccgccgacaccuuccggaagcuguuccgcguguacuccaacuuccugcggggcaagcucaagcuguacaccggggaggccugccgcacgggcgaccggugaggacuagugaagggaacacccaaauuuaauucagccuuaagcacaauuaauuaagagugaaacguaauuguacaagcaguuggucacccaccauagggcaugaucaacaccgcaaccuuuccuuuuucccccagugauucugaaaaaccccucuucccuucagcuugcuuagauguuccaaauuuaguaagcuuaaggcggccuacagaagaaaaagaaaaaaaaggccacaaaaguucccucucacuuucaguaaauaaaauaaaagcagcaacagaaauaaagaaauaaaugaaauucaaaaugaaauaaauauuguguugugcagcauuaaaaaaucaauaaaaauuaaaaaugagcaagaucuaaaaaaaaaaaaaaaaaaaaaaaaaaaaaaaaaaaaaaaaaaaaaaaaaaaaaaaaaaaaaaaagaauu

SEQ ID NO: 254 - RNA, 2271 nt, Artificial Sequence
  mRNA product Nosip_PpLuc(GC)_Gnas_A64-C30-histoneSL
gggagacuccugucgggcggaaguaggaggaguagaguuuaaaaacaguacucuuuuuccgguucgggacguaguugaagcaacgacaagccggauaaccgcucuugagacaggaagcuuaccauggaggacgccaagaacaucaagaagggcccggcgcccuucuacccgcuggaggacgggaccgccggcgagcagcuccacaaggccaugaagcgguacgcccuggugccgggcacgaucgccuucaccgacgcccacaucgaggucgacaucaccuacgcggaguacuucgagaugagcgugcgccuggccgaggccaugaagcgguacggccugaacaccaaccaccggaucguggugugcucggagaacagccugcaguucuucaugccggugcugggcgcccucuucaucggcguggccgucgccccggcgaacgacaucuacaacgagcgggagcugcugaacagcauggggaucagccagccgaccgugguguucgugagcaagaagggccugcagaagauccugaacgugcagaagaagcugcccaucauccagaagaucaucaucauggacagcaagaccgacuaccagggcuuccagucgauguacacguucgugaccagccaccucccgccgggcuucaacgaguacgacuucgucccggagagcuucgaccgggacaagaccaucgcccugaucaugaacagcagcggcagcaccggccugccgaaggggguggcccugccgcaccggaccgccugcgugcgcuucucgcacgcccgggaccccaucuucggcaaccagaucaucccggacaccgccauccugagcguggugccguuccaccacggcuucggcauguucacgacccugggcuaccucaucugcggcuuccgggugguccugauguaccgguucgaggaggagcuguuccugcggagccugcaggacuacaagauccagagcgcgcugcucgugccgacccuguucagcuucuucgccaagagcacccugaucgacaaguacgaccugucgaaccugcacgagaucgccagcgggggcgccccgcugagcaaggaggugggcgaggccguggccaagcgguuccaccucccgggcauccgccagggcuacggccugaccgagaccacgagcgcgauccugaucacccccgagggggacgacaagccgggcgccgugggcaagguggucccguucuucgaggccaaggugguggaccuggacaccggcaagacccugggcgugaaccagcggggcgagcugugcgugcgggggccgaugaucaugagcggcuacgugaacaacccggaggccaccaacgcccucaucgacaaggacggcuggcugcacagcggcgacaucgccuacugggacgaggacgagcacuucuucaucgucgaccggcugaagucgcugaucaaguacaagggcuaccagguggcgccggccgagcuggagagcauccugcuccagcaccccaacaucuucgacgccggcguggccgggcugccggacgacgacgccggcgagcugccggccgcggugguggugcuggagcacggcaagaccaugacggagaaggagaucgucgacuacguggccagccaggugaccaccgccaagaagcugcggggcggcgugguguucguggacgaggucccgaagggccugaccgggaagcucgacgcccggaagauccgcgagauccugaucaaggccaagaagggcggcaagaucgccgugugaggacuagugaagggaacacccaaauuuaauucagccuuaagcacaauuaauuaagagugaaacguaauuguacaagcaguuggucacccaccauagggcaugaucaacaccgcaaccuuuccuuuuucccccagugauucugaaaaaccccucuucccuucagcuugcuuagauguuccaaauuuaguaagcuuaaggcggccuacagaagaaaaagaaaaaaaaggccacaaaaguucccucucacuuucaguaaauaaaauaaaagcagcaacagaaauaaagaaauaaaugaaauucaaaaugaaauaaauauuguguugugcagcauuaaaaaaucaauaaaaauuaaaaaugagcaagaucuaaaaaaaaaaaaaaaaaaaaaaaaaaaaaaaaaaaaaaaaaaaaaaaaaaaaaaaaaaaaaaaaugcaucccccccccccccccccccccccccccccccaaaggcucuuuucagagccaccagaauu

SEQ ID NO: 255 - RNA, 2212 nt, Artificial Sequence
  mRNA product Nosip_PpLuc(GC)_Gnas_A64
gggagacuccugucgggcggaaguaggaggaguagaguuuaaaaacaguacucuuuuuccgguucgggacguaguugaagcaacgacaagccggauaaccgcucuugagacaggaagcuuaccauggaggacgccaagaacaucaagaagggcccggcgcccuucuacccgcuggaggacgggaccgccggcgagcagcuccacaaggccaugaagcgguacgcccuggugccgggcacgaucgccuucaccgacgcccacaucgaggucgacaucaccuacgcggaguacuucgagaugagcgugcgccuggccgaggccaugaagcgguacggccugaacaccaaccaccggaucguggugugcucggagaacagccugcaguucuucaugccggugcugggcgcccucuucaucggcguggccgucgccccggcgaacgacaucuacaacgagcgggagcugcugaacagcauggggaucagccagccgaccgugguguucgugagcaagaagggccugcagaagauccugaacgugcagaagaagcugcccaucauccagaagaucaucaucauggacagcaagaccgacuaccagggcuuccagucgauguacacguucgugaccagccaccucccgccgggcuucaacgaguacgacuucgucccggagagcuucgaccgggacaagaccaucgcccugaucaugaacagcagcggcagcaccggccugccgaaggggguggcccugccgcaccggaccgccugcgugcgcuucucgcacgcccgggaccccaucuucggcaaccagaucaucccggacaccgccauccugagcguggugccguuccaccacggcuucggcauguucacgacccugggcuaccucaucugcggcuuccgggugguccugauguaccgguucgaggaggagcuguuccugcggagccugcaggacuacaagauccagagcgcgcugcucgugccgacccuguucagcuucuucgccaagagcacccugaucgacaaguacgaccugucgaaccugcacgagaucgccagcgggggcgccccgcugagcaaggaggugggcgaggccguggccaagcgguuccaccucccgggcauccgccagggcuacggccugaccgagaccacgagcgcgauccugaucacccccgagggggacgacaagccgggcgccgugggcaagguggucccguucuucgaggccaaggugguggaccuggacaccggcaagacccugggcgugaaccagcggggcgagcugugcgugcgggggccgaugaucaugagcggcuacgugaacaacccggaggccaccaacgcccucaucgacaaggacggcuggcugcacagcggcgacaucgccuacugggacgaggacgagcacuucuucaucgucgaccggcugaagucgcugaucaaguacaagggcuaccagguggcgccggccgagcuggagagcauccugcuccagcaccccaacaucuucgacgccggcguggccgggcugccggacgacgacgccggcgagcugccggccgcggugguggugcuggagcacggcaagaccaugacggagaaggagaucgucgacuacguggccagccaggugaccaccgccaagaagcugcggggcggcgugguguucguggacgaggucccgaagggccugaccgggaagcucgacgcccggaagauccgcgagauccugaucaaggccaagaagggcggcaagaucgccgugugaggacuagugaagggaacacccaaauuuaauucagccuuaagcacaauuaauuaagagugaaacguaauuguacaagcaguuggucacccaccauagggcaugaucaacaccgcaaccuuuccuuuuucccccagugauucugaaaaaccccucuucccuucagcuugcuuagauguuccaaauuuaguaagcuuaaggcggccuacagaagaaaaagaaaaaaaaggccacaaaaguucccucucacuuucaguaaauaaaauaaaagcagcaacagaaauaaagaaauaaaugaaauucaaaaugaaauaaauauuguguugugcagcauuaaaaaaucaauaaaaauuaaaaaugagcaagaucuaaaaaaaaaaaaaaaaaaaaaaaaaaaaaaaaaaaaaaaaaaaaaaaaaaaaaaaaaaaaaaaagaauu

SEQ ID NO: 256 - RNA, 2280 nt, Artificial Sequence
  mRNA product Nosip_protein of interest example 5_Gnas_A64-C30-histoneSL
  misc_feature (124)..(1785): n is a, c, g, or u
gggagacuccugucgggcggaaguaggaggaguagaguuuaaaaacaguacucuuuuuccgguucgggacguaguugaagcaacgacaagccggauaaccgcucuugagacaggaagcuuaccnnnnnnnnnnnnnnnnnnnnnnnnnnnnnnnnnnnnnnnnnnnnnnnnnnnnnnnnnnnnnnnnnnnnnnnnnnnnnnnnnnnnnnnnnnnnnnnnnnnnnnnnnnnnnnnnnnnnnnnnnnnnnnnnnnnnnnnnnnnnnnnnnnnnnnnnnnnnnnnnnnnnnnnnnnnnnnnnnnnnnnnnnnnnnnnnnnnnnnnnnnnnnnnnnnnnnnnnnnnnnnnnnnnnnnnnnnnnnnnnnnnnnnnnnnnnnnnnnnnnnnnnnnnnnnnnnnnnnnnnnnnnnnnnnnnnnnnnnnnnnnnnnnnnnnnnnnnnnnnnnnnnnnnnnnnnnnnnnnnnnnnnnnnnnnnnnnnnnnnnnnnnnnnnnnnnnnnnnnnnnnnnnnnnnnnnnnnnnnnnnnnnnnnnnnnnnnnnnnnnnnnnnnnnnnnnnnnnnnnnnnnnnnnnnnnnnnnnnnnnnnnnnnnnnnnnnnnnnnnnnnnnnnnnnnnnnnnnnnnnnnnnnnnnnnnnnnnnnnnnnnnnnnnnnnnnnnnnnnnnnnnnnnnnnnnnnnnnnnnnnnnnnnnnnnnnnnnnnnnnnnnnnnnnnnnnnnnnnnnnnnnnnnnnnnnnnnnnnnnnnnnnnnnnnnnnnnnnnnnnnnnnnnnnnnnnnnnnnnnnnnnnnnnnnnnnnnnnnnnnnnnnnnnnnnnnnnnnnnnnnnnnnnnnnnnnnnnnnnnnnnnnnnnnnnnnnnnnnnnnnnnnnnnnnnnnnnnnnnnnnnnnnnnnnnnnnnnnnnnnnnnnnnnnnnnnnnnnnnnnnnnnnnnnnnnnnnnnnnnnnnnnnnnnnnnnnnnnnnnnnnnnnnnnnnnnnnnnnnnnnnnnnnnnnnnnnnnnnnnnnnnnnnnnnnnnnnnnnnnnnnnnnnnnnnnnnnnnnnnnnnnnnnnnnnnnnnnnnnnnnnnnnnnnnnnnnnnnnnnnnnnnnnnnnnnnnnnnnnnnnnnnnnnnnnnnnnnnnnnnnnnnnnnnnnnnnnnnnnnnnnnnnnnnnnnnnnnnnnnnnnnnnnnnnnnnnnnnnnnnnnnnnnnnnnnnnnnnnnnnnnnnnnnnnnnnnnnnnnnnnnnnnnnnnnnnnnnnnnnnnnnnnnnnnnnnnnnnnnnnnnnnnnnnnnnnnnnnnnnnnnnnnnnnnnnnnnnnnnnnnnnnnnnnnnnnnnnnnnnnnnnnnnnnnnnnnnnnnnnnnnnnnnnnnnnnnnnnnnnnnnnnnnnnnnnnnnnnnnnnnnnnnnnnnnnnnnnnnnnnnnnnnnnnnnnnnnnnnnnnnnnnnnnnnnnnnnnnnnnnnnnnnnnnnnnnnnnnnnnnnnnnnnnnnnnnnnnnnnnnnnnnnnnnnnnnnnnnnnnnnnnnnnnnnnnnnnnnnnnnnnnnnnnnnnnnnnnnnnnnnnnnnnnnnnnnnnnnnnnnnnnnnnnnnnnnnnnnnnnnnnnnnnnnnnnnnnnnnnnnnnnnnnnnnnnnnnnnnnnnnnnnnnnnnnnnnnnnnnnnnnnnnnnnnnnnnnnnnnnnnnnnnnnnnnnnnnnnnnnnnnnnnnnnnnnnnnnnnnnnnnnnnnnnnnnnnnnnnnnnnnnnnnnnnnnnnnnnnnnnnnnnnnnnnnnnnnnnnnnnnnnnnnnnnnnnnnnnnnnnnnggacuagugaagggaacacccaaauuuaauucagccuuaagcacaauuaauuaagagugaaacguaauuguacaagcaguuggucacccaccauagggcaugaucaacaccgcaaccuuuccuuuuucccccagugauucugaaaaaccccucuucccuucagcuugcuuagauguuccaaauuuaguaagcuuaaggcggccuacagaagaaaaagaaaaaaaaggccacaaaaguucccucucacuuucaguaaauaaaauaaaagcagcaacagaaauaaagaaauaaaugaaauucaaaaugaaauaaauauuguguugugcagcauuaaaaaaucaauaaaaauuaaaaaugagcaagaucuaaaaaaaaaaaaaaaaaaaaaaaaaaaaaaaaaaaaaaaaaaaaaaaaaaaaaaaaaaaaaaaaugcaucccccccccccccccccccccccccccccccaaaggcucuuuucagagccaccagaauu

SEQ ID NO: 257 - RNA, 1973 nt, Artificial Sequence
  mRNA product Nosip_RAV-G(GC)_Ndufa1_A64-C30-histoneSL
gggagacuccugucgggcggaaguaggaggaguagaguuuaaaaacaguacucuuuuuccgguucgggacguaguugaagcaacgacaagccggauaaccgcucuugagacaggaagcuuaccauggugccccaggcccuccuguucgucccgcugcugguguucccccucugcuucggcaaguuccccaucuacaccauccccgacaagcuggggccguggagccccaucgacauccaccaccuguccugccccaacaaccucguggucgaggacgagggcugcaccaaccugagcggguucuccuacauggagcugaaggugggcuacaucagcgccaucaagaugaacggguucacgugcaccggcguggucaccgaggcggagaccuacacgaacuucgugggcuacgugaccaccaccuucaagcggaagcacuuccgccccacgccggacgccugccgggccgccuacaacuggaagauggccggggacccccgcuacgaggagucccuccacaaccccuaccccgacuaccacuggcugcggaccgucaagaccaccaaggagagccuggugaucaucuccccgagcguggcggaccucgaccccuacgaccgcucccugcacagccgggucuuccccggcgggaacugcuccggcguggccgugagcuccacguacugcagcaccaaccacgacuacaccaucuggaugcccgagaacccgcgccuggggauguccugcgacaucuucaccaacagccggggcaagcgcgccuccaagggcagcgagacgugcggguucgucgacgagcggggccucuacaagucccugaagggggccugcaagcugaagcucugcggcgugcugggccugcgccucauggacgggaccuggguggcgaugcagaccagcaacgagaccaaguggugcccccccggccagcuggucaaccugcacgacuuccggagcgacgagaucgagcaccucgugguggaggagcuggucaagaagcgcgaggagugccuggacgcccucgaguccaucaugacgaccaagagcguguccuuccggcgccugagccaccuccggaagcuggugcccggguucggcaaggccuacaccaucuucaacaagacccugauggaggccgacgcccacuacaaguccguccgcacguggaacgagaucaucccgagcaaggggugccugcgggugggcggccgcugccacccccacgucaacgggguguucuucaacggcaucauccucgggcccgacggcaacgugcugauccccgagaugcaguccagccugcuccagcagcacauggagcugcuggucuccagcgugaucccgcucaugcacccccuggcggaccccuccaccguguucaagaacggggacgaggccgaggacuucgucgaggugcaccuccccgacgugcacgagcggaucagcggcgucgaccugggccugccgaacugggggaaguacgugcugcucuccgccggcgcccugaccgcccugaugcugaucaucuuccucaugaccugcuggcgccgggugaaccggagcgagcccacgcagcacaaccugcgcgggaccggccgggaggucuccgugaccccgcagagcgggaagaucaucuccagcugggaguccuacaagagcggcggcgagaccgggcugugaggacuaguggaagcauuuuccuggcugauuaaaagaaauuacucagcuauggucaucuguuccuguuagaaggcuaugcagcauauuauauacuaugcgcauguuaugaaaugcauaauaaaaaauuuuaaaaaaucuaaaagaucuaaaaaaaaaaaaaaaaaaaaaaaaaaaaaaaaaaaaaaaaaaaaaaaaaaaaaaaaaaaaaaaaugcaucccccccccccccccccccccccccccccccaaaggcucuuuucagagccaccagaauu

SEQ ID NO: 258 - RNA, 1914 nt, Artificial Sequence
  mRNA product Nosip_RAV-G(GC)_Ndufa1_A64
gggagacuccugucgggcggaaguaggaggaguagaguuuaaaaacaguacucuuuuuccgguucgggacguaguugaagcaacgacaagccggauaaccgcucuugagacaggaagcuuaccauggugccccaggcccuccuguucgucccgcugcugguguucccccucugcuucggcaaguuccccaucuacaccauccccgacaagcuggggccguggagccccaucgacauccaccaccuguccugccccaacaaccucguggucgaggacgagggcugcaccaaccugagcggguucuccuacauggagcugaaggugggcuacaucagcgccaucaagaugaacggguucacgugcaccggcguggucaccgaggcggagaccuacacgaacuucgugggcuacgugaccaccaccuucaagcggaagcacuuccgccccacgccggacgccugccgggccgccuacaacuggaagauggccggggacccccgcuacgaggagucccuccacaaccccuaccccgacuaccacuggcugcggaccgucaagaccaccaaggagagccuggugaucaucuccccgagcguggcggaccucgaccccuacgaccgcucccugcacagccgggucuuccccggcgggaacugcuccggcguggccgugagcuccacguacugcagcaccaaccacgacuacaccaucuggaugcccgagaacccgcgccuggggauguccugcgacaucuucaccaacagccggggcaagcgcgccuccaagggcagcgagacgugcggguucgucgacgagcggggccucuacaagucccugaagggggccugcaagcugaagcucugcggcgugcugggccugcgccucauggacgggaccuggguggcgaugcagaccagcaacgagaccaaguggugcccccccggccagcuggucaaccugcacgacuuccggagcgacgagaucgagcaccucgugguggaggagcuggucaagaagcgcgaggagugccuggacgcccucgaguccaucaugacgaccaagagcguguccuuccggcgccugagccaccuccggaagcuggugcccggguucggcaaggccuacaccaucuucaacaagacccugauggaggccgacgcccacuacaaguccguccgcacguggaacgagaucaucccgagcaaggggugccugcgggugggcggccgcugccacccccacgucaacgggguguucuucaacggcaucauccucgggcccgacggcaacgugcugauccccgagaugcaguccagccugcuccagcagcacauggagcugcuggucuccagcgugaucccgcucaugcacccccuggcggaccccuccaccguguucaagaacggggacgaggccgaggacuucgucgaggugcaccuccccgacgugcacgagcggaucagcggcgucgaccugggccugccgaacugggggaaguacgugcugcucuccgccggcgcccugaccgcccugaugcugaucaucuuccucaugaccugcuggcgccgggugaaccggagcgagcccacgcagcacaaccugcgcgggaccggccgggaggucuccgugaccccgcagagcgggaagaucaucuccagcugggaguccuacaagagcggcggcgagaccgggcugugaggacuaguggaagcauuuuccuggcugauuaaaagaaauuacucagcuauggucaucuguuccuguuagaaggcuaugcagcauauuauauacuaugcgcauguuaugaaaugcauaauaaaaaauuuuaaaaaaucuaaaagaucuaaaaaaaaaaaaaaaaaaaaaaaaaaaaaaaaaaaaaaaaaaaaaaaaaaaaaaaaaaaaaaaagaauu

SEQ ID NO: 259 - RNA, 980 nt, Artificial Sequence
  mRNA product Nosip_HsEPO(GC)_Ndufa1_A64-C30-histoneSL
gggagacuccugucgggcggaaguaggaggaguagaguuuaaaaacaguacucuuuuuccgguucgggacguaguugaagcaacgacaagccggauaaccgcucuugagacaggaagcuuaccaugggcgugcacgagugccccgccuggcuguggcuccugcugagccuccugucccugccgcucgggcugcccguccugggcgcccccccgcggcucaucugcgacagccgcgugcuggagcgguaccugcucgaggcgaaggaggccgagaacaucaccaccgggugcgccgagcacugcucccugaacgagaacaucacggugccggacaccaaggucaacuucuacgccuggaagcgcauggaggugggccagcaggccguggaggucuggcaggggcuggcgcuccugagcgaggccgugcugcggggccaggcccuccuggugaacuccagccagcccugggagccccugcagcuccacgucgacaaggccguguccggccugcgcagccugaccacccuccugcgggcgcugggggcccagaaggaggccaucucccccccggacgccgccagcgcggccccgcuccgcacgaucaccgccgacaccuuccggaagcuguuccgcguguacuccaacuuccugcggggcaagcucaagcuguacaccggggaggccugccgcacgggcgaccggugaggacuaguggaagcauuuuccuggcugauuaaaagaaauuacucagcuauggucaucuguuccuguuagaaggcuaugcagcauauuauauacuaugcgcauguuaugaaaugcauaauaaaaaauuuuaaaaaaucuaaaagaucuaaaaaaaaaaaaaaaaaaaaaaaaaaaaaaaaaaaaaaaaaaaaaaaaaaaaaaaaaaaaaaaaugcaucccccccccccccccccccccccccccccccaaaggcucuuuucagagccaccagaauu

SEQ ID NO: 260 - RNA, 921 nt, Artificial Sequence
  mRNA product Nosip_HsEPO(GC)_Ndufa1_A64
gggagacuccugucgggcggaaguaggaggaguagaguuuaaaaacaguacucuuuuuccgguucgggacguaguugaagcaacgacaagccggauaaccgcucuugagacaggaagcuuaccaugggcgugcacgagugccccgccuggcuguggcuccugcugagccuccugucccugccgcucgggcugcccguccugggcgcccccccgcggcucaucugcgacagccgcgugcuggagcgguaccugcucgaggcgaaggaggccgagaacaucaccaccgggugcgccgagcacugcucccugaacgagaacaucacggugccggacaccaaggucaacuucuacgccuggaagcgcauggaggugggccagcaggccguggaggucuggcaggggcuggcgcuccugagcgaggccgugcugcggggccaggcccuccuggugaacuccagccagcccugggagccccugcagcuccacgucgacaaggccguguccggccugcgcagccugaccacccuccugcgggcgcugggggcccagaaggaggccaucucccccccggacgccgccagcgcggccccgcuccgcacgaucaccgccgacaccuuccggaagcuguuccgcguguacuccaacuuccugcggggcaagcucaagcuguacaccggggaggccugccgcacgggcgaccggugaggacuaguggaagcauuuuccuggcugauuaaaagaaauuacucagcuauggucaucuguuccuguuagaaggcuaugcagcauauuauauacuaugcgcauguuaugaaaugcauaauaaaaaauuuuaaaaaaucuaaaagaucuaaaaaaaaaaaaaaaaaaaaaaaaaaaaaaaaaaaaaaaaaaaaaaaaaaaaaaaaaaaaaaaagaauu

SEQ ID NO: 261 - RNA, 2051 nt, Artificial Sequence
  mRNA product Nosip_PpLuc(GC)_Ndufa1_A64-C30-histoneSL
gggagacuccugucgggcggaaguaggaggaguagaguuuaaaaacaguacucuuuuuccgguucgggacguaguugaagcaacgacaagccggauaaccgcucuugagacaggaagcuuaccauggaggacgccaagaacaucaagaagggcccggcgcccuucuacccgcuggaggacgggaccgccggcgagcagcuccacaaggccaugaagcgguacgcccuggugccgggcacgaucgccuucaccgacgcccacaucgaggucgacaucaccuacgcggaguacuucgagaugagcgugcgccuggccgaggccaugaagcgguacggccugaacaccaaccaccggaucguggugugcucggagaacagccugcaguucuucaugccggugcugggcgcccucuucaucggcguggccgucgccccggcgaacgacaucuacaacgagcgggagcugcugaacagcauggggaucagccagccgaccgugguguucgugagcaagaagggccugcagaagauccugaacgugcagaagaagcugcccaucauccagaagaucaucaucauggacagcaagaccgacuaccagggcuuccagucgauguacacguucgugaccagccaccucccgccgggcuucaacgaguacgacuucgucccggagagcuucgaccgggacaagaccaucgcccugaucaugaacagcagcggcagcaccggccugccgaaggggguggcccugccgcaccggaccgccugcgugcgcuucucgcacgcccgggaccccaucuucggcaaccagaucaucccggacaccgccauccugagcguggugccguuccaccacggcuucggcauguucacgacccugggcuaccucaucugcggcuuccgggugguccugauguaccgguucgaggaggagcuguuccugcggagccugcaggacuacaagauccagagcgcgcugcucgugccgacccuguucagcuucuucgccaagagcacccugaucgacaaguacgaccugucgaaccugcacgagaucgccagcgggggcgccccgcugagcaaggaggugggcgaggccguggccaagcgguuccaccucccgggcauccgccagggcuacggccugaccgagaccacgagcgcgauccugaucacccccgagggggacgacaagccgggcgccgugggcaagguggucccguucuucgaggccaaggugguggaccuggacaccggcaagacccugggcgugaaccagcggggcgagcugugcgugcgggggccgaugaucaugagcggcuacgugaacaacccggaggccaccaacgcccucaucgacaaggacggcuggcugcacagcggcgacaucgccuacugggacgaggacgagcacuucuucaucgucgaccggcugaagucgcugaucaaguacaagggcuaccagguggcgccggccgagcuggagagcauccugcuccagcaccccaacaucuucgacgccggcguggccgggcugccggacgacgacgccggcgagcugccggccgcggugguggugcuggagcacggcaagaccaugacggagaaggagaucgucgacuacguggccagccaggugaccaccgccaagaagcugcggggcggcgugguguucguggacgaggucccgaagggccugaccgggaagcucgacgcccggaagauccgcgagauccugaucaaggccaagaagggcggcaagaucgccgugugaggacuaguggaagcauuuuccuggcugauuaaaagaaauuacucagcuauggucaucuguuccuguuagaaggcuaugcagcauauuauauacuaugcgcauguuaugaaaugcauaauaaaaaauuuuaaaaaaucuaaaagaucuaaaaaaaaaaaaaaaaaaaaaaaaaaaaaaaaaaaaaaaaaaaaaaaaaaaaaaaaaaaaaaaaugcaucccccccccccccccccccccccccccccccaaaggcucuuuucagagccaccagaauu

SEQ ID NO: 262 - RNA, 1992 nt, Artificial Sequence
  mRNA product Nosip_PpLuc(GC)_Ndufa1_A64
gggagacuccugucgggcggaaguaggaggaguagaguuuaaaaacaguacucuuuuuccgguucgggacguaguugaagcaacgacaagccggauaaccgcucuugagacaggaagcuuaccauggaggacgccaagaacaucaagaagggcccggcgcccuucuacccgcuggaggacgggaccgccggcgagcagcuccacaaggccaugaagcgguacgcccuggugccgggcacgaucgccuucaccgacgcccacaucgaggucgacaucaccuacgcggaguacuucgagaugagcgugcgccuggccgaggccaugaagcgguacggccugaacaccaaccaccggaucguggugugcucggagaacagccugcaguucuucaugccggugcugggcgcccucuucaucggcguggccgucgccccggcgaacgacaucuacaacgagcgggagcugcugaacagcauggggaucagccagccgaccgugguguucgugagcaagaagggccugcagaagauccugaacgugcagaagaagcugcccaucauccagaagaucaucaucauggacagcaagaccgacuaccagggcuuccagucgauguacacguucgugaccagccaccucccgccgggcuucaacgaguacgacuucgucccggagagcuucgaccgggacaagaccaucgcccugaucaugaacagcagcggcagcaccggccugccgaaggggguggcccugccgcaccggaccgccugcgugcgcuucucgcacgcccgggaccccaucuucggcaaccagaucaucccggacaccgccauccugagcguggugccguuccaccacggcuucggcauguucacgacccugggcuaccucaucugcggcuuccgggugguccugauguaccgguucgaggaggagcuguuccugcggagccugcaggacuacaagauccagagcgcgcugcucgugccgacccuguucagcuucuucgccaagagcacccugaucgacaaguacgaccugucgaaccugcacgagaucgccagcgggggcgccccgcugagcaaggaggugggcgaggccguggccaagcgguuccaccucccgggcauccgccagggcuacggccugaccgagaccacgagcgcgauccugaucacccccgagggggacgacaagccgggcgccgugggcaagguggucccguucuucgaggccaaggugguggaccuggacaccggcaagacccugggcgugaaccagcggggcgagcugugcgugcgggggccgaugaucaugagcggcuacgugaacaacccggaggccaccaacgcccucaucgacaaggacggcuggcugcacagcggcgacaucgccuacugggacgaggacgagcacuucuucaucgucgaccggcugaagucgcugaucaaguacaagggcuaccagguggcgccggccgagcuggagagcauccugcuccagcaccccaacaucuucgacgccggcguggccgggcugccggacgacgacgccggcgagcugccggccgcggugguggugcuggagcacggcaagaccaugacggagaaggagaucgucgacuacguggccagccaggugaccaccgccaagaagcugcggggcggcgugguguucguggacgaggucccgaagggccugaccgggaagcucgacgcccggaagauccgcgagauccugaucaaggccaagaagggcggcaagaucgccgugugaggacuaguggaagcauuuuccuggcugauuaaaagaaauuacucagcuauggucaucuguuccuguuagaaggcuaugcagcauauuauauacuaugcgcauguuaugaaaugcauaauaaaaaauuuuaaaaaaucuaaaagaucuaaaaaaaaaaaaaaaaaaaaaaaaaaaaaaaaaaaaaaaaaaaaaaaaaaaaaaaaaaaaaaaagaauu

SEQ ID NO: 263 - RNA, 2060 nt, Artificial Sequence
  mRNA product Nosip_protein of interest example 5_Ndufa1_A64-C30-histoneSL
  misc_feature (124)..(1785): n is a, c, g, or u
gggagacuccugucgggcggaaguaggaggaguagaguuuaaaaacaguacucuuuuuccgguucgggacguaguugaagcaacgacaagccggauaaccgcucuugagacaggaagcuuaccnnnnnnnnnnnnnnnnnnnnnnnnnnnnnnnnnnnnnnnnnnnnnnnnnnnnnnnnnnnnnnnnnnnnnnnnnnnnnnnnnnnnnnnnnnnnnnnnnnnnnnnnnnnnnnnnnnnnnnnnnnnnnnnnnnnnnnnnnnnnnnnnnnnnnnnnnnnnnnnnnnnnnnnnnnnnnnnnnnnnnnnnnnnnnnnnnnnnnnnnnnnnnnnnnnnnnnnnnnnnnnnnnnnnnnnnnnnnnnnnnnnnnnnnnnnnnnnnnnnnnnnnnnnnnnnnnnnnnnnnnnnnnnnnnnnnnnnnnnnnnnnnnnnnnnnnnnnnnnnnnnnnnnnnnnnnnnnnnnnnnnnnnnnnnnnnnnnnnnnnnnnnnnnnnnnnnnnnnnnnnnnnnnnnnnnnnnnnnnnnnnnnnnnnnnnnnnnnnnnnnnnnnnnnnnnnnnnnnnnnnnnnnnnnnnnnnnnnnnnnnnnnnnnnnnnnnnnnnnnnnnnnnnnnnnnnnnnnnnnnnnnnnnnnnnnnnnnnnnnnnnnnnnnnnnnnnnnnnnnnnnnnnnnnnnnnnnnnnnnnnnnnnnnnnnnnnnnnnnnnnnnnnnnnnnnnnnnnnnnnnnnnnnnnnnnnnnnnnnnnnnnnnnnnnnnnnnnnnnnnnnnnnnnnnnnnnnnnnnnnnnnnnnnnnnnnnnnnnnnnnnnnnnnnnnnnnnnnnnnnnnnnnnnnnnnnnnnnnnnnnnnnnnnnnnnnnnnnnnnnnnnnnnnnnnnnnnnnnnnnnnnnnnnnnnnnnnnnnnnnnnnnnnnnnnnnnnnnnnnnnnnnnnnnnnnnnnnnnnnnnnnnnnnnnnnnnnnnnnnnnnnnnnnnnnnnnnnnnnnnnnnnnnnnnnnnnnnnnnnnnnnnnnnnnnnnnnnnnnnnnnnnnnnnnnnnnnnnnnnnnnnnnnnnnnnnnnnnnnnnnnnnnnnnnnnnnnnnnnnnnnnnnnnnnnnnnnnnnnnnnnnnnnnnnnnnnnnnnnnnnnnnnnnnnnnnnnnnnnnnnnnnnnnnnnnnnnnnnnnnnnnnnnnnnnnnnnnnnnnnnnnnnnnnnnnnnnnnnnnnnnnnnnnnnnnnnnnnnnnnnnnnnnnnnnnnnnnnnnnnnnnnnnnnnnnnnnnnnnnnnnnnnnnnnnnnnnnnnnnnnnnnnnnnnnnnnnnnnnnnnnnnnnnnnnnnnnnnnnnnnnnnnnnnnnnnnnnnnnnnnnnnnnnnnnnnnnnnnnnnnnnnnnnnnnnnnnnnnnnnnnnnnnnnnnnnnnnnnnnnnnnnnnnnnnnnnnnnnnnnnnnnnnnnnnnnnnnnnnnnnnnnnnnnnnnnnnnnnnnnnnnnnnnnnnnnnnnnnnnnnnnnnnnnnnnnnnnnnnnnnnnnnnnnnnnnnnnnnnnnnnnnnnnnnnnnnnnnnnnnnnnnnnnnnnnnnnnnnnnnnnnnnnnnnnnnnnnnnnnnnnnnnnnnnnnnnnnnnnnnnnnnnnnnnnnnnnnnnnnnnnnnnnnnnnnnnnnnnnnnnnnnnnnnnnnnnnnnnnnnnnnnnnnnnnnnnnnnnnnnnnnnnnnnnnnnnnnnnnnnnnnnnnnnnnnnnnnnnnnnnnnnnnnnnnnnnnnnnnnnnnnnnnnnnnnnnnnnnnnnnnnnnnnnnnnnnnnnnnnnnnggacuaguggaagcauuuuccuggcugauuaaaagaaauuacucagcuauggucaucuguuccuguuagaaggcuaugcagcauauuauauacuaugcgcauguuaugaaaugcauaauaaaaaauuuuaaaaaaucuaaaagaucuaaaaaaaaaaaaaaaaaaaaaaaaaaaaaaaaaaaaaaaaaaaaaaaaaaaaaaaaaaaaaaaaugcaucccccccccccccccccccccccccccccccaaaggcucuuuucagagccaccagaauu

SEQ ID NO: 264 - RNA, 1910 nt, Artificial Sequence
  mRNA product Nosip_RAV-G(GC)_RPS9_A64-C30-histoneSL
gggagacuccugucgggcggaaguaggaggaguagaguuuaaaaacaguacucuuuuuccgguucgggacguaguugaagcaacgacaagccggauaaccgcucuugagacaggaagcuuaccauggugccccaggcccuccuguucgucccgcugcugguguucccccucugcuucggcaaguuccccaucuacaccauccccgacaagcuggggccguggagccccaucgacauccaccaccuguccugccccaacaaccucguggucgaggacgagggcugcaccaaccugagcggguucuccuacauggagcugaaggugggcuacaucagcgccaucaagaugaacggguucacgugcaccggcguggucaccgaggcggagaccuacacgaacuucgugggcuacgugaccaccaccuucaagcggaagcacuuccgccccacgccggacgccugccgggccgccuacaacuggaagauggccggggacccccgcuacgaggagucccuccacaaccccuaccccgacuaccacuggcugcggaccgucaagaccaccaaggagagccuggugaucaucuccccgagcguggcggaccucgaccccuacgaccgcucccugcacagccgggucuuccccggcgggaacugcuccggcguggccgugagcuccacguacugcagcaccaaccacgacuacaccaucuggaugcccgagaacccgcgccuggggauguccugcgacaucuucaccaacagccggggcaagcgcgccuccaagggcagcgagacgugcggguucgucgacgagcggggccucuacaagucccugaagggggccugcaagcugaagcucugcggcgugcugggccugcgccucauggacgggaccuggguggcgaugcagaccagcaacgagaccaaguggugcccccccggccagcuggucaaccugcacgacuuccggagcgacgagaucgagcaccucgugguggaggagcuggucaagaagcgcgaggagugccuggacgcccucgaguccaucaugacgaccaagagcguguccuuccggcgccugagccaccuccggaagcuggugcccggguucggcaaggccuacaccaucuucaacaagacccugauggaggccgacgcccacuacaaguccguccgcacguggaacgagaucaucccgagcaaggggugccugcgggugggcggccgcugccacccccacgucaacgggguguucuucaacggcaucauccucgggcccgacggcaacgugcugauccccgagaugcaguccagccugcuccagcagcacauggagcugcuggucuccagcgugaucccgcucaugcacccccuggcggaccccuccaccguguucaagaacggggacgaggccgaggacuucgucgaggugcaccuccccgacgugcacgagcggaucagcggcgucgaccugggccugccgaacugggggaaguacgugcugcucuccgccggcgcccugaccgcccugaugcugaucaucuuccucaugaccugcuggcgccgggugaaccggagcgagcccacgcagcacaaccugcgcgggaccggccgggaggucuccgugaccccgcagagcgggaagaucaucuccagcugggaguccuacaagagcggcggcgagaccgggcugugaggacuaguguccaccugucccuccugggcugcuggauugucucguuuuccugccaaauaaacaggaucagcgcuuuacagaucuaaaaaaaaaaaaaaaaaaaaaaaaaaaaaaaaaaaaaaaaaaaaaaaaaaaaaaaaaaaaaaaaugcaucccccccccccccccccccccccccccccccaaaggcucuuuucagagccaccagaauu

SEQ ID NO: 265 - RNA, 1851 nt, Artificial Sequence
  mRNA product Nosip_RAV-G(GC)_RPS9_A64
gggagacuccugucgggcggaaguaggaggaguagaguuuaaaaacaguacucuuuuuccgguucgggacguaguugaagcaacgacaagccggauaaccgcucuugagacaggaagcuuaccauggugccccaggcccuccuguucgucccgcugcugguguucccccucugcuucggcaaguuccccaucuacaccauccccgacaagcuggggccguggagccccaucgacauccaccaccuguccugccccaacaaccucguggucgaggacgagggcugcaccaaccugagcggguucuccuacauggagcugaaggugggcuacaucagcgccaucaagaugaacggguucacgugcaccggcguggucaccgaggcggagaccuacacgaacuucgugggcuacgugaccaccaccuucaagcggaagcacuuccgccccacgccggacgccugccgggccgccuacaacuggaagauggccggggacccccgcuacgaggagucccuccacaaccccuaccccgacuaccacuggcugcggaccgucaagaccaccaaggagagccuggugaucaucuccccgagcguggcggaccucgaccccuacgaccgcucccugcacagccgggucuuccccggcgggaacugcuccggcguggccgugagcuccacguacugcagcaccaaccacgacuacaccaucuggaugcccgagaacccgcgccuggggauguccugcgacaucuucaccaacagccggggcaagcgcgccuccaagggcagcgagacgugcggguucgucgacgagcggggccucuacaagucccugaagggggccugcaagcugaagcucugcggcgugcugggccugcgccucauggacgggaccuggguggcgaugcagaccagcaacgagaccaaguggugcccccccggccagcuggucaaccugcacgacuuccggagcgacgagaucgagcaccucgugguggaggagcuggucaagaagcgcgaggagugccuggacgcccucgaguccaucaugacgaccaagagcguguccuuccggcgccugagccaccuccggaagcuggugcccggguucggcaaggccuacaccaucuucaacaagacccugauggaggccgacgcccacuacaaguccguccgcacguggaacgagaucaucccgagcaaggggugccugcgggugggcggccgcugccacccccacgucaacgggguguucuucaacggcaucauccucgggcccgacggcaacgugcugauccccgagaugcaguccagccugcuccagcagcacauggagcugcuggucuccagcgugaucccgcucaugcacccccuggcggaccccuccaccguguucaagaacggggacgaggccgaggacuucgucgaggugcaccuccccgacgugcacgagcggaucagcggcgucgaccugggccugccgaacugggggaaguacgugcugcucuccgccggcgcccugaccgcccugaugcugaucaucuuccucaugaccugcuggcgccgggugaaccggagcgagcccacgcagcacaaccugcgcgggaccggccgggaggucuccgugaccccgcagagcgggaagaucaucuccagcugggaguccuacaagagcggcggcgagaccgggcugugaggacuaguguccaccugucccuccugggcugcuggauugucucguuuuccugccaaauaaacaggaucagcgcuuuacagaucuaaaaaaaaaaaaaaaaaaaaaaaaaaaaaaaaaaaaaaaaaaaaaaaaaaaaaaaaaaaaaaaagaauu

SEQ ID NO: 266 - RNA, 917 nt, Artificial Sequence
  mRNA product Nosip_HsEPO(GC)_RPS9_A64-C30-histoneSL
gggagacuccugucgggcggaaguaggaggaguagaguuuaaaaacaguacucuuuuuccgguucgggacguaguugaagcaacgacaagccggauaaccgcucuugagacaggaagcuuaccaugggcgugcacgagugccccgccuggcuguggcuccugcugagccuccugucccugccgcucgggcugcccguccugggcgcccccccgcggcucaucugcgacagccgcgugcuggagcgguaccugcucgaggcgaaggaggccgagaacaucaccaccgggugcgccgagcacugcucccugaacgagaacaucacggugccggacaccaaggucaacuucuacgccuggaagcgcauggaggugggccagcaggccguggaggucuggcaggggcuggcgcuccugagcgaggccgugcugcggggccaggcccuccuggugaacuccagccagcccugggagccccugcagcuccacgucgacaaggccguguccggccugcgcagccugaccacccuccugcgggcgcugggggcccagaaggaggccaucucccccccggacgccgccagcgcggccccgcuccgcacgaucaccgccgacaccuuccggaagcuguuccgcguguacuccaacuuccugcggggcaagcucaagcuguacaccggggaggccugccgcacgggcgaccggugaggacuaguguccaccugucccuccugggcugcuggauugucucguuuuccugccaaauaaacaggaucagcgcuuuacagaucuaaaaaaaaaaaaaaaaaaaaaaaaaaaaaaaaaaaaaaaaaaaaaaaaaaaaaaaaaaaaaaaaugcaucccccccccccccccccccccccccccccccaaaggcucuuuucagagccaccagaauu

SEQ ID NO: 267 - RNA, 858 nt, Artificial Sequence
  mRNA product Nosip_HsEPO(GC)_RPS9_A64
gggagacuccugucgggcggaaguaggaggaguagaguuuaaaaacaguacucuuuuuccgguucgggacguaguugaagcaacgacaagccggauaaccgcucuugagacaggaagcuuaccaugggcgugcacgagugccccgccuggcuguggcuccugcugagccuccugucccugccgcucgggcugcccguccugggcgcccccccgcggcucaucugcgacagccgcgugcuggagcgguaccugcucgaggcgaaggaggccgagaacaucaccaccgggugcgccgagcacugcucccugaacgagaacaucacggugccggacaccaaggucaacuucuacgccuggaagcgcauggaggugggccagcaggccguggaggucuggcaggggcuggcgcuccugagcgaggccgugcugcggggccaggcccuccuggugaacuccagccagcccugggagccccugcagcuccacgucgacaaggccguguccggccugcgcagccugaccacccuccugcgggcgcugggggcccagaaggaggccaucucccccccggacgccgccagcgcggccccgcuccgcacgaucaccgccgacaccuuccggaagcuguuccgcguguacuccaacuuccugcggggcaagcucaagcuguacaccggggaggccugccgcacgggcgaccggugaggacuaguguccaccugucccuccugggcugcuggauugucucguuuuccugccaaauaaacaggaucagcgcuuuacagaucuaaaaaaaaaaaaaaaaaaaaaaaaaaaaaaaaaaaaaaaaaaaaaaaaaaaaaaaaaaaaaaaagaauu

SEQ ID NO: 268 - RNA, 1988 nt, Artificial Sequence
  mRNA product Nosip_PpLuc(GC)_RPS9_A64-C30-histoneSL
gggagacuccugucgggcggaaguaggaggaguagaguuuaaaaacaguacucuuuuuccgguucgggacguaguugaagcaacgacaagccggauaaccgcucuugagacaggaagcuuaccauggaggacgccaagaacaucaagaagggcccggcgcccuucuacccgcuggaggacgggaccgccggcgagcagcuccacaaggccaugaagcgguacgcccuggugccgggcacgaucgccuucaccgacgcccacaucgaggucgacaucaccuacgcggaguacuucgagaugagcgugcgccuggccgaggccaugaagcgguacggccugaacaccaaccaccggaucguggugugcucggagaacagccugcaguucuucaugccggugcugggcgcccucuucaucggcguggccgucgccccggcgaacgacaucuacaacgagcgggagcugcugaacagcauggggaucagccagccgaccgugguguucgugagcaagaagggccugcagaagauccugaacgugcagaagaagcugcccaucauccagaagaucaucaucauggacagcaagaccgacuaccagggcuuccagucgauguacacguucgugaccagccaccucccgccgggcuucaacgaguacgacuucgucccggagagcuucgaccgggacaagaccaucgcccugaucaugaacagcagcggcagcaccggccugccgaaggggguggcccugccgcaccggaccgccugcgugcgcuucucgcacgcccgggaccccaucuucggcaaccagaucaucccggacaccgccauccugagcguggugccguuccaccacggcuucggcauguucacgacccugggcuaccucaucugcggcuuccgggugguccugauguaccgguucgaggaggagcuguuccugcggagccugcaggacuacaagauccagagcgcgcugcucgugccgacccuguucagcuucuucgccaagagcacccugaucgacaaguacgaccugucgaaccugcacgagaucgccagcgggggcgccccgcugagcaaggaggugggcgaggccguggccaagcgguuccaccucccgggcauccgccagggcuacggccugaccgagaccacgagcgcgauccugaucacccccgagggggacgacaagccgggcgccgugggcaagguggucccguucuucgaggccaaggugguggaccuggacaccggcaagacccugggcgugaaccagcggggcgagcugugcgugcgggggccgaugaucaugagcggcuacgugaacaacccggaggccaccaacgcccucaucgacaaggacggcuggcugcacagcggcgacaucgccuacugggacgaggacgagcacuucuucaucgucgaccggcugaagucgcugaucaaguacaagggcuaccagguggcgccggccgagcuggagagcauccugcuccagcaccccaacaucuucgacgccggcguggccgggcugccggacgacgacgccggcgagcugccggccgcggugguggugcuggagcacggcaagaccaugacggagaaggagaucgucgacuacguggccagccaggugaccaccgccaagaagcugcggggcggcgugguguucguggacgaggucccgaagggccugaccgggaagcucgacgcccggaagauccgcgagauccugaucaaggccaagaagggcggcaagaucgccgugugaggacuaguguccaccugucccuccugggcugcuggauugucucguuuuccugccaaauaaacaggaucagcgcuuuacagaucuaaaaaaaaaaaaaaaaaaaaaaaaaaaaaaaaaaaaaaaaaaaaaaaaaaaaaaaaaaaaaaaaugcaucccccccccccccccccccccccccccccccaaaggcucuuuucagagccaccagaauu

SEQ ID NO: 269 - RNA, 1929 nt, Artificial Sequence
  mRNA product Nosip_PpLuc(GC)_RPS9_A64
gggagacuccugucgggcggaaguaggaggaguagaguuuaaaaacaguacucuuuuuccgguucgggacguaguugaagcaacgacaagccggauaaccgcucuugagacaggaagcuuaccauggaggacgccaagaacaucaagaagggcccggcgcccuucuacccgcuggaggacgggaccgccggcgagcagcuccacaaggccaugaagcgguacgcccuggugccgggcacgaucgccuucaccgacgcccacaucgaggucgacaucaccuacgcggaguacuucgagaugagcgugcgccuggccgaggccaugaagcgguacggccugaacaccaaccaccggaucguggugugcucggagaacagccugcaguucuucaugccggugcugggcgcccucuucaucggcguggccgucgccccggcgaacgacaucuacaacgagcgggagcugcugaacagcauggggaucagccagccgaccgugguguucgugagcaagaagggccugcagaagauccugaacgugcagaagaagcugcccaucauccagaagaucaucaucauggacagcaagaccgacuaccagggcuuccagucgauguacacguucgugaccagccaccucccgccgggcuucaacgaguacgacuucgucccggagagcuucgaccgggacaagaccaucgcccugaucaugaacagcagcggcagcaccggccugccgaaggggguggcccugccgcaccggaccgccugcgugcgcuucucgcacgcccgggaccccaucuucggcaaccagaucaucccggacaccgccauccugagcguggugccguuccaccacggcuucggcauguucacgacccugggcuaccucaucugcggcuuccgggugguccugauguaccgguucgaggaggagcuguuccugcggagccugcaggacuacaagauccagagcgcgcugcucgugccgacccuguucagcuucuucgccaagagcacccugaucgacaaguacgaccugucgaaccugcacgagaucgccagcgggggcgccccgcugagcaaggaggugggcgaggccguggccaagcgguuccaccucccgggcauccgccagggcuacggccugaccgagaccacgagcgcgauccugaucacccccgagggggacgacaagccgggcgccgugggcaagguggucccguucuucgaggccaaggugguggaccuggacaccggcaagacccugggcgugaaccagcggggcgagcugugcgugcgggggccgaugaucaugagcggcuacgugaacaacccggaggccaccaacgcccucaucgacaaggacggcuggcugcacagcggcgacaucgccuacugggacgaggacgagcacuucuucaucgucgaccggcugaagucgcugaucaaguacaagggcuaccagguggcgccggccgagcuggagagcauccugcuccagcaccccaacaucuucgacgccggcguggccgggcugccggacgacgacgccggcgagcugccggccgcggugguggugcuggagcacggcaagaccaugacggagaaggagaucgucgacuacguggccagccaggugaccaccgccaagaagcugcggggcggcgugguguucguggacgaggucccgaagggccugaccgggaagcucgacgcccggaagauccgcgagauccugaucaaggccaagaagggcggcaagaucgccgugugaggacuaguguccaccugucccuccugggcugcuggauugucucguuuuccugccaaauaaacaggaucagcgcuuuacagaucuaaaaaaaaaaaaaaaaaaaaaaaaaaaaaaaaaaaaaaaaaaaaaaaaaaaaaaaaaaaaaaaagaauu

SEQ ID NO: 270 - RNA, 1997 nt, Artificial Sequence
  mRNA product Nosip_protein of interest example 5_RPS9_A64-C30-histoneSL
  misc_feature (124)..(1785): n is a, c, g, or u
gggagacuccugucgggcggaaguaggaggaguagaguuuaaaaacaguacucuuuuuccgguucgggacguaguugaagcaacgacaagccggauaaccgcucuugagacaggaagcuuaccnnnnnnnnnnnnnnnnnnnnnnnnnnnnnnnnnnnnnnnnnnnnnnnnnnnnnnnnnnnnnnnnnnnnnnnnnnnnnnnnnnnnnnnnnnnnnnnnnnnnnnnnnnnnnnnnnnnnnnnnnnnnnnnnnnnnnnnnnnnnnnnnnnnnnnnnnnnnnnnnnnnnnnnnnnnnnnnnnnnnnnnnnnnnnnnnnnnnnnnnnnnnnnnnnnnnnnnnnnnnnnnnnnnnnnnnnnnnnnnnnnnnnnnnnnnnnnnnnnnnnnnnnnnnnnnnnnnnnnnnnnnnnnnnnnnnnnnnnnnnnnnnnnnnnnnnnnnnnnnnnnnnnnnnnnnnnnnnnnnnnnnnnnnnnnnnnnnnnnnnnnnnnnnnnnnnnnnnnnnnnnnnnnnnnnnnnnnnnnnnnnnnnnnnnnnnnnnnnnnnnnnnnnnnnnnnnnnnnnnnnnnnnnnnnnnnnnnnnnnnnnnnnnnnnnnnnnnnnnnnnnnnnnnnnnnnnnnnnnnnnnnnnnnnnnnnnnnnnnnnnnnnnnnnnnnnnnnnnnnnnnnnnnnnnnnnnnnnnnnnnnnnnnnnnnnnnnnnnnnnnnnnnnnnnnnnnnnnnnnnnnnnnnnnnnnnnnnnnnnnnnnnnnnnnnnnnnnnnnnnnnnnnnnnnnnnnnnnnnnnnnnnnnnnnnnnnnnnnnnnnnnnnnnnnnnnnnnnnnnnnnnnnnnnnnnnnnnnnnnnnnnnnnnnnnnnnnnnnnnnnnnnnnnnnnnnnnnnnnnnnnnnnnnnnnnnnnnnnnnnnnnnnnnnnnnnnnnnnnnnnnnnnnnnnnnnnnnnnnnnnnnnnnnnnnnnnnnnnnnnnnnnnnnnnnnnnnnnnnnnnnnnnnnnnnnnnnnnnnnnnnnnnnnnnnnnnnnnnnnnnnnnnnnnnnnnnnnnnnnnnnnnnnnnnnnnnnnnnnnnnnnnnnnnnnnnnnnnnnnnnnnnnnnnnnnnnnnnnnnnnnnnnnnnnnnnnnnnnnnnnnnnnnnnnnnnnnnnnnnnnnnnnnnnnnnnnnnnnnnnnnnnnnnnnnnnnnnnnnnnnnnnnnnnnnnnnnnnnnnnnnnnnnnnnnnnnnnnnnnnnnnnnnnnnnnnnnnnnnnnnnnnnnnnnnnnnnnnnnnnnnnnnnnnnnnnnnnnnnnnnnnnnnnnnnnnnnnnnnnnnnnnnnnnnnnnnnnnnnnnnnnnnnnnnnnnnnnnnnnnnnnnnnnnnnnnnnnnnnnnnnnnnnnnnnnnnnnnnnnnnnnnnnnnnnnnnnnnnnnnnnnnnnnnnnnnnnnnnnnnnnnnnnnnnnnnnnnnnnnnnnnnnnnnnnnnnnnnnnnnnnnnnnnnnnnnnnnnnnnnnnnnnnnnnnnnnnnnnnnnnnnnnnnnnnnnnnnnnnnnnnnnnnnnnnnnnnnnnnnnnnnnnnnnnnnnnnnnnnnnnnnnnnnnnnnnnnnnnnnnnnnnnnnnnnnnnnnnnnnnnnnnnnnnnnnnnnnnnnnnnnnnnnnnnnnnnnnnnnnnnnnnnnnnnnnnnnnnnnnnnnnnnnnnnnnnnnnnnnnnnnnnnnnnnnnnnnnnnnnnnnnnnnnnnnnnnnnnnnnnnnnnnnnnnnnnnnnnnnnnnnnnnnnnnnnnnnnnnnnnnnnnnnnnnnnnnnnnnnnnnnggacuaguguccaccugucccuccugggcugcuggauugucucguuuuccugccaaauaaacaggaucagcgcuuuacagaucuaaaaaaaaaaaaaaaaaaaaaaaaaaaaaaaaaaaaaaaaaaaaaaaaaaaaaaaaaaaaaaaaugcaucccccccccccccccccccccccccccccccaaaggcucuuuucagagccaccagaauu

SEQ ID NO: 271 - RNA, 1873 nt, Artificial Sequence
  mRNA product Rpl31_RAV-G(GC)_PSMB3_A64-C30-histoneSL
gggagacccgugacccggaaguuguacggcuacgcgacuuucccucccacaaacccucgcgcccuuccuuuccuacuugggcccggcagaaagcuuaccauggugccccaggcccuccuguucgucccgcugcugguguucccccucugcuucggcaaguuccccaucuacaccauccccgacaagcuggggccguggagccccaucgacauccaccaccuguccugccccaacaaccucguggucgaggacgagggcugcaccaaccugagcggguucuccuacauggagcugaaggugggcuacaucagcgccaucaagaugaacggguucacgugcaccggcguggucaccgaggcggagaccuacacgaacuucgugggcuacgugaccaccaccuucaagcggaagcacuuccgccccacgccggacgccugccgggccgccuacaacuggaagauggccggggacccccgcuacgaggagucccuccacaaccccuaccccgacuaccacuggcugcggaccgucaagaccaccaaggagagccuggugaucaucuccccgagcguggcggaccucgaccccuacgaccgcucccugcacagccgggucuuccccggcgggaacugcuccggcguggccgugagcuccacguacugcagcaccaaccacgacuacaccaucuggaugcccgagaacccgcgccuggggauguccugcgacaucuucaccaacagccggggcaagcgcgccuccaagggcagcgagacgugcggguucgucgacgagcggggccucuacaagucccugaagggggccugcaagcugaagcucugcggcgugcugggccugcgccucauggacgggaccuggguggcgaugcagaccagcaacgagaccaaguggugcccccccggccagcuggucaaccugcacgacuuccggagcgacgagaucgagcaccucgugguggaggagcuggucaagaagcgcgaggagugccuggacgcccucgaguccaucaugacgaccaagagcguguccuuccggcgccugagccaccuccggaagcuggugcccggguucggcaaggccuacaccaucuucaacaagacccugauggaggccgacgcccacuacaaguccguccgcacguggaacgagaucaucccgagcaaggggugccugcgggugggcggccgcugccacccccacgucaacgggguguucuucaacggcaucauccucgggcccgacggcaacgugcugauccccgagaugcaguccagccugcuccagcagcacauggagcugcuggucuccagcgugaucccgcucaugcacccccuggcggaccccuccaccguguucaagaacggggacgaggccgaggacuucgucgaggugcaccuccccgacgugcacgagcggaucagcggcgucgaccugggccugccgaacugggggaaguacgugcugcucuccgccggcgcccugaccgcccugaugcugaucaucuuccucaugaccugcuggcgccgggugaaccggagcgagcccacgcagcacaaccugcgcgggaccggccgggaggucuccgugaccccgcagagcgggaagaucaucuccagcugggaguccuacaagagcggcggcgagaccgggcugugaggacuagucccuguucccagagcccacuuuuuuuucuuuuuuugaaauaaaauagccugucuuucagaucuaaaaaaaaaaaaaaaaaaaaaaaaaaaaaaaaaaaaaaaaaaaaaaaaaaaaaaaaaaaaaaaaugcaucccccccccccccccccccccccccccccccaaaggcucuuuucagagccaccagaauu

SEQ ID NO: 272 - RNA, 1814 nt, Artificial Sequence
  mRNA product Rpl31_RAV-G(GC)_PSMB3_A64
gggagacccgugacccggaaguuguacggcuacgcgacuuucccucccacaaacccucgcgcccuuccuuuccuacuugggcccggcagaaagcuuaccauggugccccaggcccuccuguucgucccgcugcugguguucccccucugcuucggcaaguuccccaucuacaccauccccgacaagcuggggccguggagccccaucgacauccaccaccuguccugccccaacaaccucguggucgaggacgagggcugcaccaaccugagcggguucuccuacauggagcugaaggugggcuacaucagcgccaucaagaugaacggguucacgugcaccggcguggucaccgaggcggagaccuacacgaacuucgugggcuacgugaccaccaccuucaagcggaagcacuuccgccccacgccggacgccugccgggccgccuacaacuggaagauggccggggacccccgcuacgaggagucccuccacaaccccuaccccgacuaccacuggcugcggaccgucaagaccaccaaggagagccuggugaucaucuccccgagcguggcggaccucgaccccuacgaccgcucccugcacagccgggucuuccccggcgggaacugcuccggcguggccgugagcuccacguacugcagcaccaaccacgacuacaccaucuggaugcccgagaacccgcgccuggggauguccugcgacaucuucaccaacagccggggcaagcgcgccuccaagggcagcgagacgugcggguucgucgacgagcggggccucuacaagucccugaagggggccugcaagcugaagcucugcggcgugcugggccugcgccucauggacgggaccuggguggcgaugcagaccagcaacgagaccaaguggugcccccccggccagcuggucaaccugcacgacuuccggagcgacgagaucgagcaccucgugguggaggagcuggucaagaagcgcgaggagugccuggacgcccucgaguccaucaugacgaccaagagcguguccuuccggcgccugagccaccuccggaagcuggugcccggguucggcaaggccuacaccaucuucaacaagacccugauggaggccgacgcccacuacaaguccguccgcacguggaacgagaucaucccgagcaaggggugccugcgggugggcggccgcugccacccccacgucaacgggguguucuucaacggcaucauccucgggcccgacggcaacgugcugauccccgagaugcaguccagccugcuccagcagcacauggagcugcuggucuccagcgugaucccgcucaugcacccccuggcggaccccuccaccguguucaagaacggggacgaggccgaggacuucgucgaggugcaccuccccgacgugcacgagcggaucagcggcgucgaccugggccugccgaacugggggaaguacgugcugcucuccgccggcgcccugaccgcccugaugcugaucaucuuccucaugaccugcuggcgccgggugaaccggagcgagcccacgcagcacaaccugcgcgggaccggccgggaggucuccgugaccccgcagagcgggaagaucaucuccagcugggaguccuacaagagcggcggcgagaccgggcugugaggacuagucccuguucccagagcccacuuuuuuuucuuuuuuugaaauaaaauagccugucuuucagaucuaaaaaaaaaaaaaaaaaaaaaaaaaaaaaaaaaaaaaaaaaaaaaaaaaaaaaaaaaaaaaaaagaauu

SEQ ID NO: 273 - RNA, 880 nt, Artificial Sequence
  mRNA product Rpl31_HsEPO(GC)_PSMB3_A64-C30-histoneSL
gggagacccgugacccggaaguuguacggcuacgcgacuuucccucccacaaacccucgcgcccuuccuuuccuacuugggcccggcagaaagcuuaccaugggcgugcacgagugccccgccuggcuguggcuccugcugagccuccugucccugccgcucgggcugcccguccugggcgcccccccgcggcucaucugcgacagccgcgugcuggagcgguaccugcucgaggcgaaggaggccgagaacaucaccaccgggugcgccgagcacugcucccugaacgagaacaucacggugccggacaccaaggucaacuucuacgccuggaagcgcauggaggugggccagcaggccguggaggucuggcaggggcuggcgcuccugagcgaggccgugcugcggggccaggcccuccuggugaacuccagccagcccugggagccccugcagcuccacgucgacaaggccguguccggccugcgcagccugaccacccuccugcgggcgcugggggcccagaaggaggccaucucccccccggacgccgccagcgcggccccgcuccgcacgaucaccgccgacaccuuccggaagcuguuccgcguguacuccaacuuccugcggggcaagcucaagcuguacaccggggaggccugccgcacgggcgaccggugaggacuagucccuguucccagagcccacuuuuuuuucuuuuuuugaaauaaaauagccugucuuucagaucuaaaaaaaaaaaaaaaaaaaaaaaaaaaaaaaaaaaaaaaaaaaaaaaaaaaaaaaaaaaaaaaaugcaucccccccccccccccccccccccccccccccaaaggcucuuuucagagccaccagaauu

SEQ ID NO: 274 - RNA, 821 nt, Artificial Sequence
  mRNA product Rpl31_HsEPO(GC)_PSMB3_A64
gggagacccgugacccggaaguuguacggcuacgcgacuuucccucccacaaacccucgcgcccuuccuuuccuacuugggcccggcagaaagcuuaccaugggcgugcacgagugccccgccuggcuguggcuccugcugagccuccugucccugccgcucgggcugcccguccugggcgcccccccgcggcucaucugcgacagccgcgugcuggagcgguaccugcucgaggcgaaggaggccgagaacaucaccaccgggugcgccgagcacugcucccugaacgagaacaucacggugccggacaccaaggucaacuucuacgccuggaagcgcauggaggugggccagcaggccguggaggucuggcaggggcuggcgcuccugagcgaggccgugcugcggggccaggcccuccuggugaacuccagccagcccugggagccccugcagcuccacgucgacaaggccguguccggccugcgcagccugaccacccuccugcgggcgcugggggcccagaaggaggccaucucccccccggacgccgccagcgcggccccgcuccgcacgaucaccgccgacaccuuccggaagcuguuccgcguguacuccaacuuccugcggggcaagcucaagcuguacaccggggaggccugccgcacgggcgaccggugaggacuagucccuguucccagagcccacuuuuuuuucuuuuuuugaaauaaaauagccugucuuucagaucuaaaaaaaaaaaaaaaaaaaaaaaaaaaaaaaaaaaaaaaaaaaaaaaaaaaaaaaaaaaaaaaagaauu

SEQ ID NO: 275 - RNA, 1951 nt, Artificial Sequence
  mRNA product Rpl31_PpLuc(GC)_PSMB3_A64-C30-histoneSL
gggagacccgugacccggaaguuguacggcuacgcgacuuucccucccacaaacccucgcgcccuuccuuuccuacuugggcccggcagaaagcuuaccauggaggacgccaagaacaucaagaagggcccggcgcccuucuacccgcuggaggacgggaccgccggcgagcagcuccacaaggccaugaagcgguacgcccuggugccgggcacgaucgccuucaccgacgcccacaucgaggucgacaucaccuacgcggaguacuucgagaugagcgugcgccuggccgaggccaugaagcgguacggccugaacaccaaccaccggaucguggugugcucggagaacagccugcaguucuucaugccggugcugggcgcccucuucaucggcguggccgucgccccggcgaacgacaucuacaacgagcgggagcugcugaacagcauggggaucagccagccgaccgugguguucgugagcaagaagggccugcagaagauccugaacgugcagaagaagcugcccaucauccagaagaucaucaucauggacagcaagaccgacuaccagggcuuccagucgauguacacguucgugaccagccaccucccgccgggcuucaacgaguacgacuucgucccggagagcuucgaccgggacaagaccaucgcccugaucaugaacagcagcggcagcaccggccugccgaaggggguggcccugccgcaccggaccgccugcgugcgcuucucgcacgcccgggaccccaucuucggcaaccagaucaucccggacaccgccauccugagcguggugccguuccaccacggcuucggcauguucacgacccugggcuaccucaucugcggcuuccgggugguccugauguaccgguucgaggaggagcuguuccugcggagccugcaggacuacaagauccagagcgcgcugcucgugccgacccuguucagcuucuucgccaagagcacccugaucgacaaguacgaccugucgaaccugcacgagaucgccagcgggggcgccccgcugagcaaggaggugggcgaggccguggccaagcgguuccaccucccgggcauccgccagggcuacggccugaccgagaccacgagcgcgauccugaucacccccgagggggacgacaagccgggcgccgugggcaagguggucccguucuucgaggccaaggugguggaccuggacaccggcaagacccugggcgugaaccagcggggcgagcugugcgugcgggggccgaugaucaugagcggcuacgugaacaacccggaggccaccaacgcccucaucgacaaggacggcuggcugcacagcggcgacaucgccuacugggacgaggacgagcacuucuucaucgucgaccggcugaagucgcugaucaaguacaagggcuaccagguggcgccggccgagcuggagagcauccugcuccagcaccccaacaucuucgacgccggcguggccgggcugccggacgacgacgccggcgagcugccggccgcggugguggugcuggagcacggcaagaccaugacggagaaggagaucgucgacuacguggccagccaggugaccaccgccaagaagcugcggggcggcgugguguucguggacgaggucccgaagggccugaccgggaagcucgacgcccggaagauccgcgagauccugaucaaggccaagaagggcggcaagaucgccgugugaggacuagucccuguucccagagcccacuuuuuuuucuuuuuuugaaauaaaauagccugucuuucagaucuaaaaaaaaaaaaaaaaaaaaaaaaaaaaaaaaaaaaaaaaaaaaaaaaaaaaaaaaaaaaaaaaugcaucccccccccccccccccccccccccccccccaaaggcucuuuucagagccaccagaauu

SEQ ID NO: 276 - RNA, 1892 nt, Artificial Sequence
  mRNA product Rpl31_PpLuc(GC)_PSMB3_A64
gggagacccgugacccggaaguuguacggcuacgcgacuuucccucccacaaacccucgcgcccuuccuuuccuacuugggcccggcagaaagcuuaccauggaggacgccaagaacaucaagaagggcccggcgcccuucuacccgcuggaggacgggaccgccggcgagcagcuccacaaggccaugaagcgguacgcccuggugccgggcacgaucgccuucaccgacgcccacaucgaggucgacaucaccuacgcggaguacuucgagaugagcgugcgccuggccgaggccaugaagcgguacggccugaacaccaaccaccggaucguggugugcucggagaacagccugcaguucuucaugccggugcugggcgcccucuucaucggcguggccgucgccccggcgaacgacaucuacaacgagcgggagcugcugaacagcauggggaucagccagccgaccgugguguucgugagcaagaagggccugcagaagauccugaacgugcagaagaagcugcccaucauccagaagaucaucaucauggacagcaagaccgacuaccagggcuuccagucgauguacacguucgugaccagccaccucccgccgggcuucaacgaguacgacuucgucccggagagcuucgaccgggacaagaccaucgcccugaucaugaacagcagcggcagcaccggccugccgaaggggguggcccugccgcaccggaccgccugcgugcgcuucucgcacgcccgggaccccaucuucggcaaccagaucaucccggacaccgccauccugagcguggugccguuccaccacggcuucggcauguucacgacccugggcuaccucaucugcggcuuccgggugguccugauguaccgguucgaggaggagcuguuccugcggagccugcaggacuacaagauccagagcgcgcugcucgugccgacccuguucagcuucuucgccaagagcacccugaucgacaaguacgaccugucgaaccugcacgagaucgccagcgggggcgccccgcugagcaaggaggugggcgaggccguggccaagcgguuccaccucccgggcauccgccagggcuacggccugaccgagaccacgagcgcgauccugaucacccccgagggggacgacaagccgggcgccgugggcaagguggucccguucuucgaggccaaggugguggaccuggacaccggcaagacccugggcgugaaccagcggggcgagcugugcgugcgggggccgaugaucaugagcggcuacgugaacaacccggaggccaccaacgcccucaucgacaaggacggcuggcugcacagcggcgacaucgccuacugggacgaggacgagcacuucuucaucgucgaccggcugaagucgcugaucaaguacaagggcuaccagguggcgccggccgagcuggagagcauccugcuccagcaccccaacaucuucgacgccggcguggccgggcugccggacgacgacgccggcgagcugccggccgcggugguggugcuggagcacggcaagaccaugacggagaaggagaucgucgacuacguggccagccaggugaccaccgccaagaagcugcggggcggcgugguguucguggacgaggucccgaagggccugaccgggaagcucgacgcccggaagauccgcgagauccugaucaaggccaagaagggcggcaagaucgccgugugaggacuagucccuguucccagagcccacuuuuuuuucuuuuuuugaaauaaaauagccugucuuucagaucuaaaaaaaaaaaaaaaaaaaaaaaaaaaaaaaaaaaaaaaaaaaaaaaaaaaaaaaaaaaaaaaagaauu

SEQ ID NO: 277 - RNA, 1960 nt, Artificial Sequence
  mRNA product Rpl31_protein of interest example 5_PSMB3_A64-C30-histoneSL
  misc_feature (100)..(1761): n is a, c, g, or u
gggagacccgugacccggaaguuguacggcuacgcgacuuucccucccacaaacccucgcgcccuuccuuuccuacuugggcccggcagaaagcuuaccnnnnnnnnnnnnnnnnnnnnnnnnnnnnnnnnnnnnnnnnnnnnnnnnnnnnnnnnnnnnnnnnnnnnnnnnnnnnnnnnnnnnnnnnnnnnnnnnnnnnnnnnnnnnnnnnnnnnnnnnnnnnnnnnnnnnnnnnnnnnnnnnnnnnnnnnnnnnnnnnnnnnnnnnnnnnnnnnnnnnnnnnnnnnnnnnnnnnnnnnnnnnnnnnnnnnnnnnnnnnnnnnnnnnnnnnnnnnnnnnnnnnnnnnnnnnnnnnnnnnnnnnnnnnnnnnnnnnnnnnnnnnnnnnnnnnnnnnnnnnnnnnnnnnnnnnnnnnnnnnnnnnnnnnnnnnnnnnnnnnnnnnnnnnnnnnnnnnnnnnnnnnnnnnnnnnnnnnnnnnnnnnnnnnnnnnnnnnnnnnnnnnnnnnnnnnnnnnnnnnnnnnnnnnnnnnnnnnnnnnnnnnnnnnnnnnnnnnnnnnnnnnnnnnnnnnnnnnnnnnnnnnnnnnnnnnnnnnnnnnnnnnnnnnnnnnnnnnnnnnnnnnnnnnnnnnnnnnnnnnnnnnnnnnnnnnnnnnnnnnnnnnnnnnnnnnnnnnnnnnnnnnnnnnnnnnnnnnnnnnnnnnnnnnnnnnnnnnnnnnnnnnnnnnnnnnnnnnnnnnnnnnnnnnnnnnnnnnnnnnnnnnnnnnnnnnnnnnnnnnnnnnnnnnnnnnnnnnnnnnnnnnnnnnnnnnnnnnnnnnnnnnnnnnnnnnnnnnnnnnnnnnnnnnnnnnnnnnnnnnnnnnnnnnnnnnnnnnnnnnnnnnnnnnnnnnnnnnnnnnnnnnnnnnnnnnnnnnnnnnnnnnnnnnnnnnnnnnnnnnnnnnnnnnnnnnnnnnnnnnnnnnnnnnnnnnnnnnnnnnnnnnnnnnnnnnnnnnnnnnnnnnnnnnnnnnnnnnnnnnnnnnnnnnnnnnnnnnnnnnnnnnnnnnnnnnnnnnnnnnnnnnnnnnnnnnnnnnnnnnnnnnnnnnnnnnnnnnnnnnnnnnnnnnnnnnnnnnnnnnnnnnnnnnnnnnnnnnnnnnnnnnnnnnnnnnnnnnnnnnnnnnnnnnnnnnnnnnnnnnnnnnnnnnnnnnnnnnnnnnnnnnnnnnnnnnnnnnnnnnnnnnnnnnnnnnnnnnnnnnnnnnnnnnnnnnnnnnnnnnnnnnnnnnnnnnnnnnnnnnnnnnnnnnnnnnnnnnnnnnnnnnnnnnnnnnnnnnnnnnnnnnnnnnnnnnnnnnnnnnnnnnnnnnnnnnnnnnnnnnnnnnnnnnnnnnnnnnnnnnnnnnnnnnnnnnnnnnnnnnnnnnnnnnnnnnnnnnnnnnnnnnnnnnnnnnnnnnnnnnnnnnnnnnnnnnnnnnnnnnnnnnnnnnnnnnnnnnnnnnnnnnnnnnnnnnnnnnnnnnnnnnnnnnnnnnnnnnnnnnnnnnnnnnnnnnnnnnnnnnnnnnnnnnnnnnnnnnnnnnnnnnnnnnnnnnnnnnnnnnnnnnnnnnnnnnnnnnnnnnnnnnnnnnnnnnnnnnnnnnnnnnnnnnnnnnnnnnnnnnnnnnnnnnnnnnnnnnnnnnnnnnnnnnnnnnnnnnnnnnnnnnnnnnnnnnnnnnnnnnnnnnnnnnnnnnnnnnnnnnnnnnnnnnnnnnnnnnnnnnnnnnnnnnnnnnnnnnnnnnnnggacuagucccuguucccagagcccacuuuuuuuucuuuuuuugaaauaaaauagccugucuuucagaucuaaaaaaaaaaaaaaaaaaaaaaaaaaaaaaaaaaaaaaaaaaaaaaaaaaaaaaaaaaaaaaaaugcaucccccccccccccccccccccccccccccccaaaggcucuuuucagagccaccagaauu

SEQ ID NO: 278 - RNA, 1937 nt, Artificial Sequence
  mRNA product Rpl31_RAV-G(GC)_CASP1_A64-C30-histoneSL
gggagacccgugacccggaaguuguacggcuacgcgacuuucccucccacaaacccucgcgcccuuccuuuccuacuugggcccggcagaaagcuuaccauggugccccaggcccuccuguucgucccgcugcugguguucccccucugcuucggcaaguuccccaucuacaccauccccgacaagcuggggccguggagccccaucgacauccaccaccuguccugccccaacaaccucguggucgaggacgagggcugcaccaaccugagcggguucuccuacauggagcugaaggugggcuacaucagcgccaucaagaugaacggguucacgugcaccggcguggucaccgaggcggagaccuacacgaacuucgugggcuacgugaccaccaccuucaagcggaagcacuuccgccccacgccggacgccugccgggccgccuacaacuggaagauggccggggacccccgcuacgaggagucccuccacaaccccuaccccgacuaccacuggcugcggaccgucaagaccaccaaggagagccuggugaucaucuccccgagcguggcggaccucgaccccuacgaccgcucccugcacagccgggucuuccccggcgggaacugcuccggcguggccgugagcuccacguacugcagcaccaaccacgacuacaccaucuggaugcccgagaacccgcgccuggggauguccugcgacaucuucaccaacagccggggcaagcgcgccuccaagggcagcgagacgugcggguucgucgacgagcggggccucuacaagucccugaagggggccugcaagcugaagcucugcggcgugcugggccugcgccucauggacgggaccuggguggcgaugcagaccagcaacgagaccaaguggugcccccccggccagcuggucaaccugcacgacuuccggagcgacgagaucgagcaccucgugguggaggagcuggucaagaagcgcgaggagugccuggacgcccucgaguccaucaugacgaccaagagcguguccuuccggcgccugagccaccuccggaagcuggugcccggguucggcaaggccuacaccaucuucaacaagacccugauggaggccgacgcccacuacaaguccguccgcacguggaacgagaucaucccgagcaaggggugccugcgggugggcggccgcugccacccccacgucaacgggguguucuucaacggcaucauccucgggcccgacggcaacgugcugauccccgagaugcaguccagccugcuccagcagcacauggagcugcuggucuccagcgugaucccgcucaugcacccccuggcggaccccuccaccguguucaagaacggggacgaggccgaggacuucgucgaggugcaccuccccgacgugcacgagcggaucagcggcgucgaccugggccugccgaacugggggaaguacgugcugcucuccgccggcgcccugaccgcccugaugcugaucaucuuccucaugaccugcuggcgccgggugaaccggagcgagcccacgcagcacaaccugcgcgggaccggccgggaggucuccgugaccccgcagagcgggaagaucaucuccagcugggaguccuacaagagcggcggcgagaccgggcugugaggacuaguaauaaggaaacuguaugaaugucugugggcaggaagugaagagauccuucuguaaagguuuuuggaauuaugucugcugaauaauaaacuuuuuugaaauaauaaaucugguagaaaaaugagaucuaaaaaaaaaaaaaaaaaaaaaaaaaaaaaaaaaaaaaaaaaaaaaaaaaaaaaaaaaaaaaaaaugcaucccccccccccccccccccccccccccccccaaaggcucuuuucagagccaccagaauu

SEQ ID NO: 279 - RNA, 1878 nt, Artificial Sequence
  mRNA product Rpl31_RAV-G(GC)_CASP1_A64
gggagacccgugacccggaaguuguacggcuacgcgacuuucccucccacaaacccucgcgcccuuccuuuccuacuugggcccggcagaaagcuuaccauggugccccaggcccuccuguucgucccgcugcugguguucccccucugcuucggcaaguuccccaucuacaccauccccgacaagcuggggccguggagccccaucgacauccaccaccuguccugccccaacaaccucguggucgaggacgagggcugcaccaaccugagcggguucuccuacauggagcugaaggugggcuacaucagcgccaucaagaugaacggguucacgugcaccggcguggucaccgaggcggagaccuacacgaacuucgugggcuacgugaccaccaccuucaagcggaagcacuuccgccccacgccggacgccugccgggccgccuacaacuggaagauggccggggacccccgcuacgaggagucccuccacaaccccuaccccgacuaccacuggcugcggaccgucaagaccaccaaggagagccuggugaucaucuccccgagcguggcggaccucgaccccuacgaccgcucccugcacagccgggucuuccccggcgggaacugcuccggcguggccgugagcuccacguacugcagcaccaaccacgacuacaccaucuggaugcccgagaacccgcgccuggggauguccugcgacaucuucaccaacagccggggcaagcgcgccuccaagggcagcgagacgugcggguucgucgacgagcggggccucuacaagucccugaagggggccugcaagcugaagcucugcggcgugcugggccugcgccucauggacgggaccuggguggcgaugcagaccagcaacgagaccaaguggugcccccccggccagcuggucaaccugcacgacuuccggagcgacgagaucgagcaccucgugguggaggagcuggucaagaagcgcgaggagugccuggacgcccucgaguccaucaugacgaccaagagcguguccuuccggcgccugagccaccuccggaagcuggugcccggguucggcaaggccuacaccaucuucaacaagacccugauggaggccgacgcccacuacaaguccguccgcacguggaacgagaucaucccgagcaaggggugccugcgggugggcggccgcugccacccccacgucaacgggguguucuucaacggcaucauccucgggcccgacggcaacgugcugauccccgagaugcaguccagccugcuccagcagcacauggagcugcuggucuccagcgugaucccgcucaugcacccccuggcggaccccuccaccguguucaagaacggggacgaggccgaggacuucgucgaggugcaccuccccgacgugcacgagcggaucagcggcgucgaccugggccugccgaacugggggaaguacgugcugcucuccgccggcgcccugaccgcccugaugcugaucaucuuccucaugaccugcuggcgccgggugaaccggagcgagcccacgcagcacaaccugcgcgggaccggccgggaggucuccgugaccccgcagagcgggaagaucaucuccagcugggaguccuacaagagcggcggcgagaccgggcugugaggacuaguaauaaggaaacuguaugaaugucugugggcaggaagugaagagauccuucuguaaagguuuuuggaauuaugucugcugaauaauaaacuuuuuugaaauaauaaaucugguagaaaaaugagaucuaaaaaaaaaaaaaaaaaaaaaaaaaaaaaaaaaaaaaaaaaaaaaaaaaaaaaaaaaaaaaaaagaauu

SEQ ID NO: 280 - RNA, 944 nt, Artificial Sequence
  mRNA product Rpl31_HsEPO(GC)_CASP1_A64-C30-histoneSL
gggagacccgugacccggaaguuguacggcuacgcgacuuucccucccacaaacccucgcgcccuuccuuuccuacuugggcccggcagaaagcuuaccaugggcgugcacgagugccccgccuggcuguggcuccugcugagccuccugucccugccgcucgggcugcccguccugggcgcccccccgcggcucaucugcgacagccgcgugcuggagcgguaccugcucgaggcgaaggaggccgagaacaucaccaccgggugcgccgagcacugcucccugaacgagaacaucacggugccggacaccaaggucaacuucuacgccuggaagcgcauggaggugggccagcaggccguggaggucuggcaggggcuggcgcuccugagcgaggccgugcugcggggccaggcccuccuggugaacuccagccagcccugggagccccugcagcuccacgucgacaaggccguguccggccugcgcagccugaccacccuccugcgggcgcugggggcccagaaggaggccaucucccccccggacgccgccagcgcggccccgcuccgcacgaucaccgccgacaccuuccggaagcuguuccgcguguacuccaacuuccugcggggcaagcucaagcuguacaccggggaggccugccgcacgggcgaccggugaggacuaguaauaaggaaacuguaugaaugucugugggcaggaagugaagagauccuucuguaaagguuuuuggaauuaugucugcugaauaauaaacuuuuuugaaauaauaaaucugguagaaaaaugagaucuaaaaaaaaaaaaaaaaaaaaaaaaaaaaaaaaaaaaaaaaaaaaaaaaaaaaaaaaaaaaaaaaugcaucccccccccccccccccccccccccccccccaaaggcucuuuucagagccaccagaauu

SEQ ID NO: 281 - RNA, 885 nt, Artificial Sequence
  mRNA product Rpl31_HsEPO(GC)_CASP1_A64
gggagacccgugacccggaaguuguacggcuacgcgacuuucccucccacaaacccucgcgcccuuccuuuccuacuugggcccggcagaaagcuuaccaugggcgugcacgagugccccgccuggcuguggcuccugcugagccuccugucccugccgcucgggcugcccguccugggcgcccccccgcggcucaucugcgacagccgcgugcuggagcgguaccugcucgaggcgaaggaggccgagaacaucaccaccgggugcgccgagcacugcucccugaacgagaacaucacggugccggacaccaaggucaacuucuacgccuggaagcgcauggaggugggccagcaggccguggaggucuggcaggggcuggcgcuccugagcgaggccgugcugcggggccaggcccuccuggugaacuccagccagcccugggagccccugcagcuccacgucgacaaggccguguccggccugcgcagccugaccacccuccugcgggcgcugggggcccagaaggaggccaucucccccccggacgccgccagcgcggccccgcuccgcacgaucaccgccgacaccuuccggaagcuguuccgcguguacuccaacuuccugcggggcaagcucaagcuguacaccggggaggccugccgcacgggcgaccggugaggacuaguaauaaggaaacuguaugaaugucugugggcaggaagugaagagauccuucuguaaagguuuuuggaauuaugucugcugaauaauaaacuuuuuugaaauaauaaaucugguagaaaaaugagaucuaaaaaaaaaaaaaaaaaaaaaaaaaaaaaaaaaaaaaaaaaaaaaaaaaaaaaaaaaaaaaaaagaauu

SEQ ID NO: 282 - RNA, 2015 nt, Artificial Sequence
  mRNA product Rpl31_PpLuc(GC)_CASP1_A64-C30-histoneSL
gggagacccgugacccggaaguuguacggcuacgcgacuuucccucccacaaacccucgcgcccuuccuuuccuacuugggcccggcagaaagcuuaccauggaggacgccaagaacaucaagaagggcccggcgcccuucuacccgcuggaggacgggaccgccggcgagcagcuccacaaggccaugaagcgguacgcccuggugccgggcacgaucgccuucaccgacgcccacaucgaggucgacaucaccuacgcggaguacuucgagaugagcgugcgccuggccgaggccaugaagcgguacggccugaacaccaaccaccggaucguggugugcucggagaacagccugcaguucuucaugccggugcugggcgcccucuucaucggcguggccgucgccccggcgaacgacaucuacaacgagcgggagcugcugaacagcauggggaucagccagccgaccgugguguucgugagcaagaagggccugcagaagauccugaacgugcagaagaagcugcccaucauccagaagaucaucaucauggacagcaagaccgacuaccagggcuuccagucgauguacacguucgugaccagccaccucccgccgggcuucaacgaguacgacuucgucccggagagcuucgaccgggacaagaccaucgcccugaucaugaacagcagcggcagcaccggccugccgaaggggguggcccugccgcaccggaccgccugcgugcgcuucucgcacgcccgggaccccaucuucggcaaccagaucaucccggacaccgccauccugagcguggugccguuccaccacggcuucggcauguucacgacccugggcuaccucaucugcggcuuccgggugguccugauguaccgguucgaggaggagcuguuccugcggagccugcaggacuacaagauccagagcgcgcugcucgugccgacccuguucagcuucuucgccaagagcacccugaucgacaaguacgaccugucgaaccugcacgagaucgccagcgggggcgccccgcugagcaaggaggugggcgaggccguggccaagcgguuccaccucccgggcauccgccagggcuacggccugaccgagaccacgagcgcgauccugaucacccccgagggggacgacaagccgggcgccgugggcaagguggucccguucuucgaggccaaggugguggaccuggacaccggcaagacccugggcgugaaccagcggggcgagcugugcgugcgggggccgaugaucaugagcggcuacgugaacaacccggaggccaccaacgcccucaucgacaaggacggcuggcugcacagcggcgacaucgccuacugggacgaggacgagcacuucuucaucgucgaccggcugaagucgcugaucaaguacaagggcuaccagguggcgccggccgagcuggagagcauccugcuccagcaccccaacaucuucgacgccggcguggccgggcugccggacgacgacgccggcgagcugccggccgcggugguggugcuggagcacggcaagaccaugacggagaaggagaucgucgacuacguggccagccaggugaccaccgccaagaagcugcggggcggcgugguguucguggacgaggucccgaagggccugaccgggaagcucgacgcccggaagauccgcgagauccugaucaaggccaagaagggcggcaagaucgccgugugaggacuaguaauaaggaaacuguaugaaugucugugggcaggaagugaagagauccuucuguaaagguuuuuggaauuaugucugcugaauaauaaacuuuuuugaaauaauaaaucugguagaaaaaugagaucuaaaaaaaaaaaaaaaaaaaaaaaaaaaaaaaaaaaaaaaaaaaaaaaaaaaaaaaaaaaaaaaaugcaucccccccccccccccccccccccccccccccaaaggcucuuuucagagccaccagaauu

SEQ ID NO: 283 - RNA, 1956 nt, Artificial Sequence
  mRNA product Rpl31_PpLuc(GC)_CASP1_A64
gggagacccgugacccggaaguuguacggcuacgcgacuuucccucccacaaacccucgcgcccuuccuuuccuacuugggcccggcagaaagcuuaccauggaggacgccaagaacaucaagaagggcccggcgcccuucuacccgcuggaggacgggaccgccggcgagcagcuccacaaggccaugaagcgguacgcccuggugccgggcacgaucgccuucaccgacgcccacaucgaggucgacaucaccuacgcggaguacuucgagaugagcgugcgccuggccgaggccaugaagcgguacggccugaacaccaaccaccggaucguggugugcucggagaacagccugcaguucuucaugccggugcugggcgcccucuucaucggcguggccgucgccccggcgaacgacaucuacaacgagcgggagcugcugaacagcauggggaucagccagccgaccgugguguucgugagcaagaagggccugcagaagauccugaacgugcagaagaagcugcccaucauccagaagaucaucaucauggacagcaagaccgacuaccagggcuuccagucgauguacacguucgugaccagccaccucccgccgggcuucaacgaguacgacuucgucccggagagcuucgaccgggacaagaccaucgcccugaucaugaacagcagcggcagcaccggccugccgaaggggguggcccugccgcaccggaccgccugcgugcgcuucucgcacgcccgggaccccaucuucggcaaccagaucaucccggacaccgccauccugagcguggugccguuccaccacggcuucggcauguucacgacccugggcuaccucaucugcggcuuccgggugguccugauguaccgguucgaggaggagcuguuccugcggagccugcaggacuacaagauccagagcgcgcugcucgugccgacccuguucagcuucuucgccaagagcacccugaucgacaaguacgaccugucgaaccugcacgagaucgccagcgggggcgccccgcugagcaaggaggugggcgaggccguggccaagcgguuccaccucccgggcauccgccagggcuacggccugaccgagaccacgagcgcgauccugaucacccccgagggggacgacaagccgggcgccgugggcaagguggucccguucuucgaggccaaggugguggaccuggacaccggcaagacccugggcgugaaccagcggggcgagcugugcgugcgggggccgaugaucaugagcggcuacgugaacaacccggaggccaccaacgcccucaucgacaaggacggcuggcugcacagcggcgacaucgccuacugggacgaggacgagcacuucuucaucgucgaccggcugaagucgcugaucaaguacaagggcuaccagguggcgccggccgagcuggagagcauccugcuccagcaccccaacaucuucgacgccggcguggccgggcugccggacgacgacgccggcgagcugccggccgcggugguggugcuggagcacggcaagaccaugacggagaaggagaucgucgacuacguggccagccaggugaccaccgccaagaagcugcggggcggcgugguguucguggacgaggucccgaagggccugaccgggaagcucgacgcccggaagauccgcgagauccugaucaaggccaagaagggcggcaagaucgccgugugaggacuaguaauaaggaaacuguaugaaugucugugggcaggaagugaagagauccuucuguaaagguuuuuggaauuaugucugcugaauaauaaacuuuuuugaaauaauaaaucugguagaaaaaugagaucuaaaaaaaaaaaaaaaaaaaaaaaaaaaaaaaaaaaaaaaaaaaaaaaaaaaaaaaaaaaaaaaagaauu

SEQ ID NO: 284 - RNA, 2024 nt, Artificial Sequence
  mRNA product Rpl31_protein of interest example 5_CASP1_A64-C30-histoneSL
  misc_feature (100)..(1761): n is a, c, g, or u
gggagacccgugacccggaaguuguacggcuacgcgacuuucccucccacaaacccucgcgcccuuccuuuccuacuugggcccggcagaaagcuuaccnnnnnnnnnnnnnnnnnnnnnnnnnnnnnnnnnnnnnnnnnnnnnnnnnnnnnnnnnnnnnnnnnnnnnnnnnnnnnnnnnnnnnnnnnnnnnnnnnnnnnnnnnnnnnnnnnnnnnnnnnnnnnnnnnnnnnnnnnnnnnnnnnnnnnnnnnnnnnnnnnnnnnnnnnnnnnnnnnnnnnnnnnnnnnnnnnnnnnnnnnnnnnnnnnnnnnnnnnnnnnnnnnnnnnnnnnnnnnnnnnnnnnnnnnnnnnnnnnnnnnnnnnnnnnnnnnnnnnnnnnnnnnnnnnnnnnnnnnnnnnnnnnnnnnnnnnnnnnnnnnnnnnnnnnnnnnnnnnnnnnnnnnnnnnnnnnnnnnnnnnnnnnnnnnnnnnnnnnnnnnnnnnnnnnnnnnnnnnnnnnnnnnnnnnnnnnnnnnnnnnnnnnnnnnnnnnnnnnnnnnnnnnnnnnnnnnnnnnnnnnnnnnnnnnnnnnnnnnnnnnnnnnnnnnnnnnnnnnnnnnnnnnnnnnnnnnnnnnnnnnnnnnnnnnnnnnnnnnnnnnnnnnnnnnnnnnnnnnnnnnnnnnnnnnnnnnnnnnnnnnnnnnnnnnnnnnnnnnnnnnnnnnnnnnnnnnnnnnnnnnnnnnnnnnnnnnnnnnnnnnnnnnnnnnnnnnnnnnnnnnnnnnnnnnnnnnnnnnnnnnnnnnnnnnnnnnnnnnnnnnnnnnnnnnnnnnnnnnnnnnnnnnnnnnnnnnnnnnnnnnnnnnnnnnnnnnnnnnnnnnnnnnnnnnnnnnnnnnnnnnnnnnnnnnnnnnnnnnnnnnnnnnnnnnnnnnnnnnnnnnnnnnnnnnnnnnnnnnnnnnnnnnnnnnnnnnnnnnnnnnnnnnnnnnnnnnnnnnnnnnnnnnnnnnnnnnnnnnnnnnnnnnnnnnnnnnnnnnnnnnnnnnnnnnnnnnnnnnnnnnnnnnnnnnnnnnnnnnnnnnnnnnnnnnnnnnnnnnnnnnnnnnnnnnnnnnnnnnnnnnnnnnnnnnnnnnnnnnnnnnnnnnnnnnnnnnnnnnnnnnnnnnnnnnnnnnnnnnnnnnnnnnnnnnnnnnnnnnnnnnnnnnnnnnnnnnnnnnnnnnnnnnnnnnnnnnnnnnnnnnnnnnnnnnnnnnnnnnnnnnnnnnnnnnnnnnnnnnnnnnnnnnnnnnnnnnnnnnnnnnnnnnnnnnnnnnnnnnnnnnnnnnnnnnnnnnnnnnnnnnnnnnnnnnnnnnnnnnnnnnnnnnnnnnnnnnnnnnnnnnnnnnnnnnnnnnnnnnnnnnnnnnnnnnnnnnnnnnnnnnnnnnnnnnnnnnnnnnnnnnnnnnnnnnnnnnnnnnnnnnnnnnnnnnnnnnnnnnnnnnnnnnnnnnnnnnnnnnnnnnnnnnnnnnnnnnnnnnnnnnnnnnnnnnnnnnnnnnnnnnnnnnnnnnnnnnnnnnnnnnnnnnnnnnnnnnnnnnnnnnnnnnnnnnnnnnnnnnnnnnnnnnnnnnnnnnnnnnnnnnnnnnnnnnnnnnnnnnnnnnnnnnnnnnnnnnnnnnnnnnnnnnnnnnnnnnnnnnnnnnnnnnnnnnnnnnnnnnnnnnnnnnnnnnnnnnnnnnnnnnnnnnnnnnnnnnnnnnnnnnnnnnnnnnnnnnnnnnnnnnnnnnnnnnnnnnnnnnnnnnnggacuaguaauaaggaaacuguaugaaugucugugggcaggaagugaagagauccuucuguaaagguuuuuggaauuaugucugcugaauaauaaacuuuuuugaaauaauaaaucugguagaaaaaugagaucuaaaaaaaaaaaaaaaaaaaaaaaaaaaaaaaaaaaaaaaaaaaaaaaaaaaaaaaaaaaaaaaaugcaucccccccccccccccccccccccccccccccaaaggcucuuuucagagccaccagaauu

SEQ ID NO: 285 - RNA, 1953 nt, Artificial Sequence
  mRNA product Rpl31_RAV-G(GC)_COX6B1_A64-C30-histoneSL
gggagacccgugacccggaaguuguacggcuacgcgacuuucccucccacaaacccucgcgcccuuccuuuccuacuugggcccggcagaaagcuuaccauggugccccaggcccuccuguucgucccgcugcugguguucccccucugcuucggcaaguuccccaucuacaccauccccgacaagcuggggccguggagccccaucgacauccaccaccuguccugccccaacaaccucguggucgaggacgagggcugcaccaaccugagcggguucuccuacauggagcugaaggugggcuacaucagcgccaucaagaugaacggguucacgugcaccggcguggucaccgaggcggagaccuacacgaacuucgugggcuacgugaccaccaccuucaagcggaagcacuuccgccccacgccggacgccugccgggccgccuacaacuggaagauggccggggacccccgcuacgaggagucccuccacaaccccuaccccgacuaccacuggcugcggaccgucaagaccaccaaggagagccuggugaucaucuccccgagcguggcggaccucgaccccuacgaccgcucccugcacagccgggucuuccccggcgggaacugcuccggcguggccgugagcuccacguacugcagcaccaaccacgacuacaccaucuggaugcccgagaacccgcgccuggggauguccugcgacaucuucaccaacagccggggcaagcgcgccuccaagggcagcgagacgugcggguucgucgacgagcggggccucuacaagucccugaagggggccugcaagcugaagcucugcggcgugcugggccugcgccucauggacgggaccuggguggcgaugcagaccagcaacgagaccaaguggugcccccccggccagcuggucaaccugcacgacuuccggagcgacgagaucgagcaccucgugguggaggagcuggucaagaagcgcgaggagugccuggacgcccucgaguccaucaugacgaccaagagcguguccuuccggcgccugagccaccuccggaagcuggugcccggguucggcaaggccuacaccaucuucaacaagacccugauggaggccgacgcccacuacaaguccguccgcacguggaacgagaucaucccgagcaaggggugccugcgggugggcggccgcugccacccccacgucaacgggguguucuucaacggcaucauccucgggcccgacggcaacgugcugauccccgagaugcaguccagccugcuccagcagcacauggagcugcuggucuccagcgugaucccgcucaugcacccccuggcggaccccuccaccguguucaagaacggggacgaggccgaggacuucgucgaggugcaccuccccgacgugcacgagcggaucagcggcgucgaccugggccugccgaacugggggaaguacgugcugcucuccgccggcgcccugaccgcccugaugcugaucaucuuccucaugaccugcuggcgccgggugaaccggagcgagcccacgcagcacaaccugcgcgggaccggccgggaggucuccgugaccccgcagagcgggaagaucaucuccagcugggaguccuacaagagcggcggcgagaccgggcugugaggacuaguacuggcugcaucucccuuuccucuguccuccauccuucucccaggauggugaagggggaccugguacccagugauccccaccccaggauccuaaaucaugacuuaccugcuaauaaaaacucauuggaaaagugagaagaucuaaaaaaaaaaaaaaaaaaaaaaaaaaaaaaaaaaaaaaaaaaaaaaaaaaaaaaaaaaaaaaaaugcaucccccccccccccccccccccccccccccccaaaggcucuuuucagagccaccagaauu

SEQ ID NO: 286 - RNA, 1894 nt, Artificial Sequence
  mRNA product Rpl31_RAV-G(GC)_COX6B1_A64
gggagacccgugacccggaaguuguacggcuacgcgacuuucccucccacaaacccucgcgcccuuccuuuccuacuugggcccggcagaaagcuuaccauggugccccaggcccuccuguucgucccgcugcugguguucccccucugcuucggcaaguuccccaucuacaccauccccgacaagcuggggccguggagccccaucgacauccaccaccuguccugccccaacaaccucguggucgaggacgagggcugcaccaaccugagcggguucuccuacauggagcugaaggugggcuacaucagcgccaucaagaugaacggguucacgugcaccggcguggucaccgaggcggagaccuacacgaacuucgugggcuacgugaccaccaccuucaagcggaagcacuuccgccccacgccggacgccugccgggccgccuacaacuggaagauggccggggacccccgcuacgaggagucccuccacaaccccuaccccgacuaccacuggcugcggaccgucaagaccaccaaggagagccuggugaucaucuccccgagcguggcggaccucgaccccuacgaccgcucccugcacagccgggucuuccccggcgggaacugcuccggcguggccgugagcuccacguacugcagcaccaaccacgacuacaccaucuggaugcccgagaacccgcgccuggggauguccugcgacaucuucaccaacagccggggcaagcgcgccuccaagggcagcgagacgugcggguucgucgacgagcggggccucuacaagucccugaagggggccugcaagcugaagcucugcggcgugcugggccugcgccucauggacgggaccuggguggcgaugcagaccagcaacgagaccaaguggugcccccccggccagcuggucaaccugcacgacuuccggagcgacgagaucgagcaccucgugguggaggagcuggucaagaagcgcgaggagugccuggacgcccucgaguccaucaugacgaccaagagcguguccuuccggcgccugagccaccuccggaagcuggugcccggguucggcaaggccuacaccaucuucaacaagacccugauggaggccgacgcccacuacaaguccguccgcacguggaacgagaucaucccgagcaaggggugccugcgggugggcggccgcugccacccccacgucaacgggguguucuucaacggcaucauccucgggcccgacggcaacgugcugauccccgagaugcaguccagccugcuccagcagcacauggagcugcuggucuccagcgugaucccgcucaugcacccccuggcggaccccuccaccguguucaagaacggggacgaggccgaggacuucgucgaggugcaccuccccgacgugcacgagcggaucagcggcgucgaccugggccugccgaacugggggaaguacgugcugcucuccgccggcgcccugaccgcccugaugcugaucaucuuccucaugaccugcuggcgccgggugaaccggagcgagcccacgcagcacaaccugcgcgggaccggccgggaggucuccgugaccccgcagagcgggaagaucaucuccagcugggaguccuacaagagcggcggcgagaccgggcugugaggacuaguacuggcugcaucucccuuuccucuguccuccauccuucucccaggauggugaagggggaccugguacccagugauccccaccccaggauccuaaaucaugacuuaccugcuaauaaaaacucauuggaaaagugagaagaucuaaaaaaaaaaaaaaaaaaaaaaaaaaaaaaaaaaaaaaaaaaaaaaaaaaaaaaaaaaaaaaaagaauu

SEQ ID NO: 287 - RNA, 960 nt, Artificial Sequence
  mRNA product Rpl31_HsEPO(GC)_COX6B1_A64-C30-histoneSL
gggagacccgugacccggaaguuguacggcuacgcgacuuucccucccacaaacccucgcgcccuuccuuuccuacuugggcccggcagaaagcuuaccaugggcgugcacgagugccccgccuggcuguggcuccugcugagccuccugucccugccgcucgggcugcccguccugggcgcccccccgcggcucaucugcgacagccgcgugcuggagcgguaccugcucgaggcgaaggaggccgagaacaucaccaccgggugcgccgagcacugcucccugaacgagaacaucacggugccggacaccaaggucaacuucuacgccuggaagcgcauggaggugggccagcaggccguggaggucuggcaggggcuggcgcuccugagcgaggccgugcugcggggccaggcccuccuggugaacuccagccagcccugggagccccugcagcuccacgucgacaaggccguguccggccugcgcagccugaccacccuccugcgggcgcugggggcccagaaggaggccaucucccccccggacgccgccagcgcggccccgcuccgcacgaucaccgccgacaccuuccggaagcuguuccgcguguacuccaacuuccugcggggcaagcucaagcuguacaccggggaggccugccgcacgggcgaccggugaggacuaguacuggcugcaucucccuuuccucuguccuccauccuucucccaggauggugaagggggaccugguacccagugauccccaccccaggauccuaaaucaugacuuaccugcuaauaaaaacucauuggaaaagugagaagaucuaaaaaaaaaaaaaaaaaaaaaaaaaaaaaaaaaaaaaaaaaaaaaaaaaaaaaaaaaaaaaaaaugcaucccccccccccccccccccccccccccccccaaaggcucuuuucagagccaccagaauu

SEQ ID NO: 288 - RNA, 901 nt, Artificial Sequence
  mRNA product Rpl31_HsEPO(GC)_COX6B1_A64
gggagacccgugacccggaaguuguacggcuacgcgacuuucccucccacaaacccucgcgcccuuccuuuccuacuugggcccggcagaaagcuuaccaugggcgugcacgagugccccgccuggcuguggcuccugcugagccuccugucccugccgcucgggcugcccguccugggcgcccccccgcggcucaucugcgacagccgcgugcuggagcgguaccugcucgaggcgaaggaggccgagaacaucaccaccgggugcgccgagcacugcucccugaacgagaacaucacggugccggacaccaaggucaacuucuacgccuggaagcgcauggaggugggccagcaggccguggaggucuggcaggggcuggcgcuccugagcgaggccgugcugcggggccaggcccuccuggugaacuccagccagcccugggagccccugcagcuccacgucgacaaggccguguccggccugcgcagccugaccacccuccugcgggcgcugggggcccagaaggaggccaucucccccccggacgccgccagcgcggccccgcuccgcacgaucaccgccgacaccuuccggaagcuguuccgcguguacuccaacuuccugcggggcaagcucaagcuguacaccggggaggccugccgcacgggcgaccggugaggacuaguacuggcugcaucucccuuuccucuguccuccauccuucucccaggauggugaagggggaccugguacccagugauccccaccccaggauccuaaaucaugacuuaccugcuaauaaaaacucauuggaaaagugagaagaucuaaaaaaaaaaaaaaaaaaaaaaaaaaaaaaaaaaaaaaaaaaaaaaaaaaaaaaaaaaaaaaaagaauu

SEQ ID NO: 289 - RNA, 2031 nt, Artificial Sequence
  mRNA product Rpl31_PpLuc(GC)_COX6B1_A64-C30-histoneSL
gggagacccgugacccggaaguuguacggcuacgcgacuuucccucccacaaacccucgcgcccuuccuuuccuacuugggcccggcagaaagcuuaccauggaggacgccaagaacaucaagaagggcccggcgcccuucuacccgcuggaggacgggaccgccggcgagcagcuccacaaggccaugaagcgguacgcccuggugccgggcacgaucgccuucaccgacgcccacaucgaggucgacaucaccuacgcggaguacuucgagaugagcgugcgccuggccgaggccaugaagcgguacggccugaacaccaaccaccggaucguggugugcucggagaacagccugcaguucuucaugccggugcugggcgcccucuucaucggcguggccgucgccccggcgaacgacaucuacaacgagcgggagcugcugaacagcauggggaucagccagccgaccgugguguucgugagcaagaagggccugcagaagauccugaacgugcagaagaagcugcccaucauccagaagaucaucaucauggacagcaagaccgacuaccagggcuuccagucgauguacacguucgugaccagccaccucccgccgggcuucaacgaguacgacuucgucccggagagcuucgaccgggacaagaccaucgcccugaucaugaacagcagcggcagcaccggccugccgaaggggguggcccugccgcaccggaccgccugcgugcgcuucucgcacgcccgggaccccaucuucggcaaccagaucaucccggacaccgccauccugagcguggugccguuccaccacggcuucggcauguucacgacccugggcuaccucaucugcggcuuccgggugguccugauguaccgguucgaggaggagcuguuccugcggagccugcaggacuacaagauccagagcgcgcugcucgugccgacccuguucagcuucuucgccaagagcacccugaucgacaaguacgaccugucgaaccugcacgagaucgccagcgggggcgccccgcugagcaaggaggugggcgaggccguggccaagcgguuccaccucccgggcauccgccagggcuacggccugaccgagaccacgagcgcgauccugaucacccccgagggggacgacaagccgggcgccgugggcaagguggucccguucuucgaggccaaggugguggaccuggacaccggcaagacccugggcgugaaccagcggggcgagcugugcgugcgggggccgaugaucaugagcggcuacgugaacaacccggaggccaccaacgcccucaucgacaaggacggcuggcugcacagcggcgacaucgccuacugggacgaggacgagcacuucuucaucgucgaccggcugaagucgcugaucaaguacaagggcuaccagguggcgccggccgagcuggagagcauccugcuccagcaccccaacaucuucgacgccggcguggccgggcugccggacgacgacgccggcgagcugccggccgcggugguggugcuggagcacggcaagaccaugacggagaaggagaucgucgacuacguggccagccaggugaccaccgccaagaagcugcggggcggcgugguguucguggacgaggucccgaagggccugaccgggaagcucgacgcccggaagauccgcgagauccugaucaaggccaagaagggcggcaagaucgccgugugaggacuaguacuggcugcaucucccuuuccucuguccuccauccuucucccaggauggugaagggggaccugguacccagugauccccaccccaggauccuaaaucaugacuuaccugcuaauaaaaacucauuggaaaagugagaagaucuaaaaaaaaaaaaaaaaaaaaaaaaaaaaaaaaaaaaaaaaaaaaaaaaaaaaaaaaaaaaaaaaugcaucccccccccccccccccccccccccccccccaaaggcucuuuucagagccaccagaauu

SEQ ID NO: 290 - RNA, 1972 nt, Artificial Sequence
  mRNA product Rpl31_PpLuc(GC)_COX6B1_A64
gggagacccgugacccggaaguuguacggcuacgcgacuuucccucccacaaacccucgcgcccuuccuuuccuacuugggcccggcagaaagcuuaccauggaggacgccaagaacaucaagaagggcccggcgcccuucuacccgcuggaggacgggaccgccggcgagcagcuccacaaggccaugaagcgguacgcccuggugccgggcacgaucgccuucaccgacgcccacaucgaggucgacaucaccuacgcggaguacuucgagaugagcgugcgccuggccgaggccaugaagcgguacggccugaacaccaaccaccggaucguggugugcucggagaacagccugcaguucuucaugccggugcugggcgcccucuucaucggcguggccgucgccccggcgaacgacaucuacaacgagcgggagcugcugaacagcauggggaucagccagccgaccgugguguucgugagcaagaagggccugcagaagauccugaacgugcagaagaagcugcccaucauccagaagaucaucaucauggacagcaagaccgacuaccagggcuuccagucgauguacacguucgugaccagccaccucccgccgggcuucaacgaguacgacuucgucccggagagcuucgaccgggacaagaccaucgcccugaucaugaacagcagcggcagcaccggccugccgaaggggguggcccugccgcaccggaccgccugcgugcgcuucucgcacgcccgggaccccaucuucggcaaccagaucaucccggacaccgccauccugagcguggugccguuccaccacggcuucggcauguucacgacccugggcuaccucaucugcggcuuccgggugguccugauguaccgguucgaggaggagcuguuccugcggagccugcaggacuacaagauccagagcgcgcugcucgugccgacccuguucagcuucuucgccaagagcacccugaucgacaaguacgaccugucgaaccugcacgagaucgccagcgggggcgccccgcugagcaaggaggugggcgaggccguggccaagcgguuccaccucccgggcauccgccagggcuacggccugaccgagaccacgagcgcgauccugaucacccccgagggggacgacaagccgggcgccgugggcaagguggucccguucuucgaggccaaggugguggaccuggacaccggcaagacccugggcgugaaccagcggggcgagcugugcgugcgggggccgaugaucaugagcggcuacgugaacaacccggaggccaccaacgcccucaucgacaaggacggcuggcugcacagcggcgacaucgccuacugggacgaggacgagcacuucuucaucgucgaccggcugaagucgcugaucaaguacaagggcuaccagguggcgccggccgagcuggagagcauccugcuccagcaccccaacaucuucgacgccggcguggccgggcugccggacgacgacgccggcgagcugccggccgcggugguggugcuggagcacggcaagaccaugacggagaaggagaucgucgacuacguggccagccaggugaccaccgccaagaagcugcggggcggcgugguguucguggacgaggucccgaagggccugaccgggaagcucgacgcccggaagauccgcgagauccugaucaaggccaagaagggcggcaagaucgccgugugaggacuaguacuggcugcaucucccuuuccucuguccuccauccuucucccaggauggugaagggggaccugguacccagugauccccaccccaggauccuaaaucaugacuuaccugcuaauaaaaacucauuggaaaagugagaagaucuaaaaaaaaaaaaaaaaaaaaaaaaaaaaaaaaaaaaaaaaaaaaaaaaaaaaaaaaaaaaaaaagaauu

SEQ ID NO: 291 - RNA, 2040 nt, Artificial Sequence
  mRNA product Rpl31_protein of interest example 5_COX6B1_A64-C30-histoneSL
  misc_feature (100)..(1761): n is a, c, g, or u
gggagacccgugacccggaaguuguacggcuacgcgacuuucccucccacaaacccucgcgcccuuccuuuccuacuugggcccggcagaaagcuuaccnnnnnnnnnnnnnnnnnnnnnnnnnnnnnnnnnnnnnnnnnnnnnnnnnnnnnnnnnnnnnnnnnnnnnnnnnnnnnnnnnnnnnnnnnnnnnnnnnnnnnnnnnnnnnnnnnnnnnnnnnnnnnnnnnnnnnnnnnnnnnnnnnnnnnnnnnnnnnnnnnnnnnnnnnnnnnnnnnnnnnnnnnnnnnnnnnnnnnnnnnnnnnnnnnnnnnnnnnnnnnnnnnnnnnnnnnnnnnnnnnnnnnnnnnnnnnnnnnnnnnnnnnnnnnnnnnnnnnnnnnnnnnnnnnnnnnnnnnnnnnnnnnnnnnnnnnnnnnnnnnnnnnnnnnnnnnnnnnnnnnnnnnnnnnnnnnnnnnnnnnnnnnnnnnnnnnnnnnnnnnnnnnnnnnnnnnnnnnnnnnnnnnnnnnnnnnnnnnnnnnnnnnnnnnnnnnnnnnnnnnnnnnnnnnnnnnnnnnnnnnnnnnnnnnnnnnnnnnnnnnnnnnnnnnnnnnnnnnnnnnnnnnnnnnnnnnnnnnnnnnnnnnnnnnnnnnnnnnnnnnnnnnnnnnnnnnnnnnnnnnnnnnnnnnnnnnnnnnnnnnnnnnnnnnnnnnnnnnnnnnnnnnnnnnnnnnnnnnnnnnnnnnnnnnnnnnnnnnnnnnnnnnnnnnnnnnnnnnnnnnnnnnnnnnnnnnnnnnnnnnnnnnnnnnnnnnnnnnnnnnnnnnnnnnnnnnnnnnnnnnnnnnnnnnnnnnnnnnnnnnnnnnnnnnnnnnnnnnnnnnnnnnnnnnnnnnnnnnnnnnnnnnnnnnnnnnnnnnnnnnnnnnnnnnnnnnnnnnnnnnnnnnnnnnnnnnnnnnnnnnnnnnnnnnnnnnnnnnnnnnnnnnnnnnnnnnnnnnnnnnnnnnnnnnnnnnnnnnnnnnnnnnnnnnnnnnnnnnnnnnnnnnnnnnnnnnnnnnnnnnnnnnnnnnnnnnnnnnnnnnnnnnnnnnnnnnnnnnnnnnnnnnnnnnnnnnnnnnnnnnnnnnnnnnnnnnnnnnnnnnnnnnnnnnnnnnnnnnnnnnnnnnnnnnnnnnnnnnnnnnnnnnnnnnnnnnnnnnnnnnnnnnnnnnnnnnnnnnnnnnnnnnnnnnnnnnnnnnnnnnnnnnnnnnnnnnnnnnnnnnnnnnnnnnnnnnnnnnnnnnnnnnnnnnnnnnnnnnnnnnnnnnnnnnnnnnnnnnnnnnnnnnnnnnnnnnnnnnnnnnnnnnnnnnnnnnnnnnnnnnnnnnnnnnnnnnnnnnnnnnnnnnnnnnnnnnnnnnnnnnnnnnnnnnnnnnnnnnnnnnnnnnnnnnnnnnnnnnnnnnnnnnnnnnnnnnnnnnnnnnnnnnnnnnnnnnnnnnnnnnnnnnnnnnnnnnnnnnnnnnnnnnnnnnnnnnnnnnnnnnnnnnnnnnnnnnnnnnnnnnnnnnnnnnnnnnnnnnnnnnnnnnnnnnnnnnnnnnnnnnnnnnnnnnnnnnnnnnnnnnnnnnnnnnnnnnnnnnnnnnnnnnnnnnnnnnnnnnnnnnnnnnnnnnnnnnnnnnnnnnnnnnnnnnnnnnnnnnnnnnnnnnnnnnnnnnnnnnnnnnnnnnnnnnnnnnnnnnnnnnnnnnnnnnnnnnnnnnnnnnnnnnnnnnnnnnnnnnnnnnnnnnnnnnnnnnnnnnnnnnnggacuaguacuggcugcaucucccuuuccucuguccuccauccuucucccaggauggugaagggggaccugguacccagugauccccaccccaggauccuaaaucaugacuuaccugcuaauaaaaacucauuggaaaagugagaagaucuaaaaaaaaaaaaaaaaaaaaaaaaaaaaaaaaaaaaaaaaaaaaaaaaaaaaaaaaaaaaaaaaugcaucccccccccccccccccccccccccccccccaaaggcucuuuucagagccaccagaauu

SEQ ID NO: 292 - RNA, 2169 nt, Artificial Sequence
  mRNA product Rpl31_RAV-G(GC)_Gnas_A64-C30-histoneSL
gggagacccgugacccggaaguuguacggcuacgcgacuuucccucccacaaacccucgcgcccuuccuuuccuacuugggcccggcagaaagcuuaccauggugccccaggcccuccuguucgucccgcugcugguguucccccucugcuucggcaaguuccccaucuacaccauccccgacaagcuggggccguggagccccaucgacauccaccaccuguccugccccaacaaccucguggucgaggacgagggcugcaccaaccugagcggguucuccuacauggagcugaaggugggcuacaucagcgccaucaagaugaacggguucacgugcaccggcguggucaccgaggcggagaccuacacgaacuucgugggcuacgugaccaccaccuucaagcggaagcacuuccgccccacgccggacgccugccgggccgccuacaacuggaagauggccggggacccccgcuacgaggagucccuccacaaccccuaccccgacuaccacuggcugcggaccgucaagaccaccaaggagagccuggugaucaucuccccgagcguggcggaccucgaccccuacgaccgcucccugcacagccgggucuuccccggcgggaacugcuccggcguggccgugagcuccacguacugcagcaccaaccacgacuacaccaucuggaugcccgagaacccgcgccuggggauguccugcgacaucuucaccaacagccggggcaagcgcgccuccaagggcagcgagacgugcggguucgucgacgagcggggccucuacaagucccugaagggggccugcaagcugaagcucugcggcgugcugggccugcgccucauggacgggaccuggguggcgaugcagaccagcaacgagaccaaguggugcccccccggccagcuggucaaccugcacgacuuccggagcgacgagaucgagcaccucgugguggaggagcuggucaagaagcgcgaggagugccuggacgcccucgaguccaucaugacgaccaagagcguguccuuccggcgccugagccaccuccggaagcuggugcccggguucggcaaggccuacaccaucuucaacaagacccugauggaggccgacgcccacuacaaguccguccgcacguggaacgagaucaucccgagcaaggggugccugcgggugggcggccgcugccacccccacgucaacgggguguucuucaacggcaucauccucgggcccgacggcaacgugcugauccccgagaugcaguccagccugcuccagcagcacauggagcugcuggucuccagcgugaucccgcucaugcacccccuggcggaccccuccaccguguucaagaacggggacgaggccgaggacuucgucgaggugcaccuccccgacgugcacgagcggaucagcggcgucgaccugggccugccgaacugggggaaguacgugcugcucuccgccggcgcccugaccgcccugaugcugaucaucuuccucaugaccugcuggcgccgggugaaccggagcgagcccacgcagcacaaccugcgcgggaccggccgggaggucuccgugaccccgcagagcgggaagaucaucuccagcugggaguccuacaagagcggcggcgagaccgggcugugaggacuagugaagggaacacccaaauuuaauucagccuuaagcacaauuaauuaagagugaaacguaauuguacaagcaguuggucacccaccauagggcaugaucaacaccgcaaccuuuccuuuuucccccagugauucugaaaaaccccucuucccuucagcuugcuuagauguuccaaauuuaguaagcuuaaggcggccuacagaagaaaaagaaaaaaaaggccacaaaaguucccucucacuuucaguaaauaaaauaaaagcagcaacagaaauaaagaaauaaaugaaauucaaaaugaaauaaauauuguguugugcagcauuaaaaaaucaauaaaaauuaaaaaugagcaagaucuaaaaaaaaaaaaaaaaaaaaaaaaaaaaaaaaaaaaaaaaaaaaaaaaaaaaaaaaaaaaaaaaugcaucccccccccccccccccccccccccccccccaaaggcucuuuucagagccaccagaauu

SEQ ID NO: 293 - RNA, 2110 nt, Artificial Sequence
  mRNA product Rpl31_RAV-G(GC)_Gnas_A64
gggagacccgugacccggaaguuguacggcuacgcgacuuucccucccacaaacccucgcgcccuuccuuuccuacuugggcccggcagaaagcuuaccauggugccccaggcccuccuguucgucccgcugcugguguucccccucugcuucggcaaguuccccaucuacaccauccccgacaagcuggggccguggagccccaucgacauccaccaccuguccugccccaacaaccucguggucgaggacgagggcugcaccaaccugagcggguucuccuacauggagcugaaggugggcuacaucagcgccaucaagaugaacggguucacgugcaccggcguggucaccgaggcggagaccuacacgaacuucgugggcuacgugaccaccaccuucaagcggaagcacuuccgccccacgccggacgccugccgggccgccuacaacuggaagauggccggggacccccgcuacgaggagucccuccacaaccccuaccccgacuaccacuggcugcggaccgucaagaccaccaaggagagccuggugaucaucuccccgagcguggcggaccucgaccccuacgaccgcucccugcacagccgggucuuccccggcgggaacugcuccggcguggccgugagcuccacguacugcagcaccaaccacgacuacaccaucuggaugcccgagaacccgcgccuggggauguccugcgacaucuucaccaacagccggggcaagcgcgccuccaagggcagcgagacgugcggguucgucgacgagcggggccucuacaagucccugaagggggccugcaagcugaagcucugcggcgugcugggccugcgccucauggacgggaccuggguggcgaugcagaccagcaacgagaccaaguggugcccccccggccagcuggucaaccugcacgacuuccggagcgacgagaucgagcaccucgugguggaggagcuggucaagaagcgcgaggagugccuggacgcccucgaguccaucaugacgaccaagagcguguccuuccggcgccugagccaccuccggaagcuggugcccggguucggcaaggccuacaccaucuucaacaagacccugauggaggccgacgcccacuacaaguccguccgcacguggaacgagaucaucccgagcaaggggugccugcgggugggcggccgcugccacccccacgucaacgggguguucuucaacggcaucauccucgggcccgacggcaacgugcugauccccgagaugcaguccagccugcuccagcagcacauggagcugcuggucuccagcgugaucccgcucaugcacccccuggcggaccccuccaccguguucaagaacggggacgaggccgaggacuucgucgaggugcaccuccccgacgugcacgagcggaucagcggcgucgaccugggccugccgaacugggggaaguacgugcugcucuccgccggcgcccugaccgcccugaugcugaucaucuuccucaugaccugcuggcgccgggugaaccggagcgagcccacgcagcacaaccugcgcgggaccggccgggaggucuccgugaccccgcagagcgggaagaucaucuccagcugggaguccuacaagagcggcggcgagaccgggcugugaggacuagugaagggaacacccaaauuuaauucagccuuaagcacaauuaauuaagagugaaacguaauuguacaagcaguuggucacccaccauagggcaugaucaacaccgcaaccuuuccuuuuucccccagugauucugaaaaaccccucuucccuucagcuugcuuagauguuccaaauuuaguaagcuuaaggcggccuacagaagaaaaagaaaaaaaaggccacaaaaguucccucucacuuucaguaaauaaaauaaaagcagcaacagaaauaaagaaauaaaugaaauucaaaaugaaauaaauauuguguugugcagcauuaaaaaaucaauaaaaauuaaaaaugagcaagaucuaaaaaaaaaaaaaaaaaaaaaaaaaaaaaaaaaaaaaaaaaaaaaaaaaaaaaaaaaaaaaaaagaauu

SEQ ID NO: 294 - RNA, 1176 nt, Artificial Sequence
  mRNA product Rpl31_HsEPO(GC)_Gnas_A64-C30-histoneSL
gggagacccgugacccggaaguuguacggcuacgcgacuuucccucccacaaacccucgcgcccuuccuuuccuacuugggcccggcagaaagcuuaccaugggcgugcacgagugccccgccuggcuguggcuccugcugagccuccugucccugccgcucgggcugcccguccugggcgcccccccgcggcucaucugcgacagccgcgugcuggagcgguaccugcucgaggcgaaggaggccgagaacaucaccaccgggugcgccgagcacugcucccugaacgagaacaucacggugccggacaccaaggucaacuucuacgccuggaagcgcauggaggugggccagcaggccguggaggucuggcaggggcuggcgcuccugagcgaggccgugcugcggggccaggcccuccuggugaacuccagccagcccugggagccccugcagcuccacgucgacaaggccguguccggccugcgcagccugaccacccuccugcgggcgcugggggcccagaaggaggccaucucccccccggacgccgccagcgcggccccgcuccgcacgaucaccgccgacaccuuccggaagcuguuccgcguguacuccaacuuccugcggggcaagcucaagcuguacaccggggaggccugccgcacgggcgaccggugaggacuagugaagggaacacccaaauuuaauucagccuuaagcacaauuaauuaagagugaaacguaauuguacaagcaguuggucacccaccauagggcaugaucaacaccgcaaccuuuccuuuuucccccagugauucugaaaaaccccucuucccuucagcuugcuuagauguuccaaauuuaguaagcuuaaggcggccuacagaagaaaaagaaaaaaaaggccacaaaaguucccucucacuuucaguaaauaaaauaaaagcagcaacagaaauaaagaaauaaaugaaauucaaaaugaaauaaauauuguguugugcagcauuaaaaaaucaauaaaaauuaaaaaugagcaagaucuaaaaaaaaaaaaaaaaaaaaaaaaaaaaaaaaaaaaaaaaaaaaaaaaaaaaaaaaaaaaaaaaugcaucccccccccccccccccccccccccccccccaaaggcucuuuucagagccaccagaauu

SEQ ID NO: 295 - RNA, 1117 nt, Artificial Sequence
  mRNA product Rpl31_HsEPO(GC)_Gnas_A64
gggagacccgugacccggaaguuguacggcuacgcgacuuucccucccacaaacccucgcgcccuuccuuuccuacuugggcccggcagaaagcuuaccaugggcgugcacgagugccccgccuggcuguggcuccugcugagccuccugucccugccgcucgggcugcccguccugggcgcccccccgcggcucaucugcgacagccgcgugcuggagcgguaccugcucgaggcgaaggaggccgagaacaucaccaccgggugcgccgagcacugcucccugaacgagaacaucacggugccggacaccaaggucaacuucuacgccuggaagcgcauggaggugggccagcaggccguggaggucuggcaggggcuggcgcuccugagcgaggccgugcugcggggccaggcccuccuggugaacuccagccagcccugggagccccugcagcuccacgucgacaaggccguguccggccugcgcagccugaccacccuccugcgggcgcugggggcccagaaggaggccaucucccccccggacgccgccagcgcggccccgcuccgcacgaucaccgccgacaccuuccggaagcuguuccgcguguacuccaacuuccugcggggcaagcucaagcuguacaccggggaggccugccgcacgggcgaccggugaggacuagugaagggaacacccaaauuuaauucagccuuaagcacaauuaauuaagagugaaacguaauuguacaagcaguuggucacccaccauagggcaugaucaacaccgcaaccuuuccuuuuucccccagugauucugaaaaaccccucuucccuucagcuugcuuagauguuccaaauuuaguaagcuuaaggcggccuacagaagaaaaagaaaaaaaaggccacaaaaguucccucucacuuucaguaaauaaaauaaaagcagcaacagaaauaaagaaauaaaugaaauucaaaaugaaauaaauauuguguugugcagcauuaaaaaaucaauaaaaauuaaaaaugagcaagaucuaaaaaaaaaaaaaaaaaaaaaaaaaaaaaaaaaaaaaaaaaaaaaaaaaaaaaaaaaaaaaaaagaauu

SEQ ID NO: 296 - RNA, 2247 nt, Artificial Sequence
  mRNA product Rpl31_PpLuc(GC)_Gnas_A64-C30-histoneSL
gggagacccgugacccggaaguuguacggcuacgcgacuuucccucccacaaacccucgcgcccuuccuuuccuacuugggcccggcagaaagcuuaccauggaggacgccaagaacaucaagaagggcccggcgcccuucuacccgcuggaggacgggaccgccggcgagcagcuccacaaggccaugaagcgguacgcccuggugccgggcacgaucgccuucaccgacgcccacaucgaggucgacaucaccuacgcggaguacuucgagaugagcgugcgccuggccgaggccaugaagcgguacggccugaacaccaaccaccggaucguggugugcucggagaacagccugcaguucuucaugccggugcugggcgcccucuucaucggcguggccgucgccccggcgaacgacaucuacaacgagcgggagcugcugaacagcauggggaucagccagccgaccgugguguucgugagcaagaagggccugcagaagauccugaacgugcagaagaagcugcccaucauccagaagaucaucaucauggacagcaagaccgacuaccagggcuuccagucgauguacacguucgugaccagccaccucccgccgggcuucaacgaguacgacuucgucccggagagcuucgaccgggacaagaccaucgcccugaucaugaacagcagcggcagcaccggccugccgaaggggguggcccugccgcaccggaccgccugcgugcgcuucucgcacgcccgggaccccaucuucggcaaccagaucaucccggacaccgccauccugagcguggugccguuccaccacggcuucggcauguucacgacccugggcuaccucaucugcggcuuccgggugguccugauguaccgguucgaggaggagcuguuccugcggagccugcaggacuacaagauccagagcgcgcugcucgugccgacccuguucagcuucuucgccaagagcacccugaucgacaaguacgaccugucgaaccugcacgagaucgccagcgggggcgccccgcugagcaaggaggugggcgaggccguggccaagcgguuccaccucccgggcauccgccagggcuacggccugaccgagaccacgagcgcgauccugaucacccccgagggggacgacaagccgggcgccgugggcaagguggucccguucuucgaggccaaggugguggaccuggacaccggcaagacccugggcgugaaccagcggggcgagcugugcgugcgggggccgaugaucaugagcggcuacgugaacaacccggaggccaccaacgcccucaucgacaaggacggcuggcugcacagcggcgacaucgccuacugggacgaggacgagcacuucuucaucgucgaccggcugaagucgcugaucaaguacaagggcuaccagguggcgccggccgagcuggagagcauccugcuccagcaccccaacaucuucgacgccggcguggccgggcugccggacgacgacgccggcgagcugccggccgcggugguggugcuggagcacggcaagaccaugacggagaaggagaucgucgacuacguggccagccaggugaccaccgccaagaagcugcggggcggcgugguguucguggacgaggucccgaagggccugaccgggaagcucgacgcccggaagauccgcgagauccugaucaaggccaagaagggcggcaagaucgccgugugaggacuagugaagggaacacccaaauuuaauucagccuuaagcacaauuaauuaagagugaaacguaauuguacaagcaguuggucacccaccauagggcaugaucaacaccgcaaccuuuccuuuuucccccagugauucugaaaaaccccucuucccuucagcuugcuuagauguuccaaauuuaguaagcuuaaggcggccuacagaagaaaaagaaaaaaaaggccacaaaaguucccucucacuuucaguaaauaaaauaaaagcagcaacagaaauaaagaaauaaaugaaauucaaaaugaaauaaauauuguguugugcagcauuaaaaaaucaauaaaaauuaaaaaugagcaagaucuaaaaaaaaaaaaaaaaaaaaaaaaaaaaaaaaaaaaaaaaaaaaaaaaaaaaaaaaaaaaaaaaugcaucccccccccccccccccccccccccccccccaaaggcucuuuucagagccaccagaauu

SEQ ID NO: 297 - RNA, 2188 nt, Artificial Sequence
  mRNA product Rpl31_PpLuc(GC)_Gnas_A64
gggagacccgugacccggaaguuguacggcuacgcgacuuucccucccacaaacccucgcgcccuuccuuuccuacuugggcccggcagaaagcuuaccauggaggacgccaagaacaucaagaagggcccggcgcccuucuacccgcuggaggacgggaccgccggcgagcagcuccacaaggccaugaagcgguacgcccuggugccgggcacgaucgccuucaccgacgcccacaucgaggucgacaucaccuacgcggaguacuucgagaugagcgugcgccuggccgaggccaugaagcgguacggccugaacaccaaccaccggaucguggugugcucggagaacagccugcaguucuucaugccggugcugggcgcccucuucaucggcguggccgucgccccggcgaacgacaucuacaacgagcgggagcugcugaacagcauggggaucagccagccgaccgugguguucgugagcaagaagggccugcagaagauccugaacgugcagaagaagcugcccaucauccagaagaucaucaucauggacagcaagaccgacuaccagggcuuccagucgauguacacguucgugaccagccaccucccgccgggcuucaacgaguacgacuucgucccggagagcuucgaccgggacaagaccaucgcccugaucaugaacagcagcggcagcaccggccugccgaaggggguggcccugccgcaccggaccgccugcgugcgcuucucgcacgcccgggaccccaucuucggcaaccagaucaucccggacaccgccauccugagcguggugccguuccaccacggcuucggcauguucacgacccugggcuaccucaucugcggcuuccgggugguccugauguaccgguucgaggaggagcuguuccugcggagccugcaggacuacaagauccagagcgcgcugcucgugccgacccuguucagcuucuucgccaagagcacccugaucgacaaguacgaccugucgaaccugcacgagaucgccagcgggggcgccccgcugagcaaggaggugggcgaggccguggccaagcgguuccaccucccgggcauccgccagggcuacggccugaccgagaccacgagcgcgauccugaucacccccgagggggacgacaagccgggcgccgugggcaagguggucccguucuucgaggccaaggugguggaccuggacaccggcaagacccugggcgugaaccagcggggcgagcugugcgugcgggggccgaugaucaugagcggcuacgugaacaacccggaggccaccaacgcccucaucgacaaggacggcuggcugcacagcggcgacaucgccuacugggacgaggacgagcacuucuucaucgucgaccggcugaagucgcugaucaaguacaagggcuaccagguggcgccggccgagcuggagagcauccugcuccagcaccccaacaucuucgacgccggcguggccgggcugccggacgacgacgccggcgagcugccggccgcggugguggugcuggagcacggcaagaccaugacggagaaggagaucgucgacuacguggccagccaggugaccaccgccaagaagcugcggggcggcgugguguucguggacgaggucccgaagggccugaccgggaagcucgacgcccggaagauccgcgagauccugaucaaggccaagaagggcggcaagaucgccgugugaggacuagugaagggaacacccaaauuuaauucagccuuaagcacaauuaauuaagagugaaacguaauuguacaagcaguuggucacccaccauagggcaugaucaacaccgcaaccuuuccuuuuucccccagugauucugaaaaaccccucuucccuucagcuugcuuagauguuccaaauuuaguaagcuuaaggcggccuacagaagaaaaagaaaaaaaaggccacaaaaguucccucucacuuucaguaaauaaaauaaaagcagcaacagaaauaaagaaauaaaugaaauucaaaaugaaauaaauauuguguugugcagcauuaaaaaaucaauaaaaauuaaaaaugagcaagaucuaaaaaaaaaaaaaaaaaaaaaaaaaaaaaaaaaaaaaaaaaaaaaaaaaaaaaaaaaaaaaaaagaauu

SEQ ID NO: 298 - RNA, 2256 nt, Artificial Sequence
  mRNA product Rpl31_protein of interest example 5_Gnas_A64-C30-histoneSL
  misc_feature (100)..(1761): n is a, c, g, or u
gggagacccgugacccggaaguuguacggcuacgcgacuuucccucccacaaacccucgcgcccuuccuuuccuacuugggcccggcagaaagcuuaccnnnnnnnnnnnnnnnnnnnnnnnnnnnnnnnnnnnnnnnnnnnnnnnnnnnnnnnnnnnnnnnnnnnnnnnnnnnnnnnnnnnnnnnnnnnnnnnnnnnnnnnnnnnnnnnnnnnnnnnnnnnnnnnnnnnnnnnnnnnnnnnnnnnnnnnnnnnnnnnnnnnnnnnnnnnnnnnnnnnnnnnnnnnnnnnnnnnnnnnnnnnnnnnnnnnnnnnnnnnnnnnnnnnnnnnnnnnnnnnnnnnnnnnnnnnnnnnnnnnnnnnnnnnnnnnnnnnnnnnnnnnnnnnnnnnnnnnnnnnnnnnnnnnnnnnnnnnnnnnnnnnnnnnnnnnnnnnnnnnnnnnnnnnnnnnnnnnnnnnnnnnnnnnnnnnnnnnnnnnnnnnnnnnnnnnnnnnnnnnnnnnnnnnnnnnnnnnnnnnnnnnnnnnnnnnnnnnnnnnnnnnnnnnnnnnnnnnnnnnnnnnnnnnnnnnnnnnnnnnnnnnnnnnnnnnnnnnnnnnnnnnnnnnnnnnnnnnnnnnnnnnnnnnnnnnnnnnnnnnnnnnnnnnnnnnnnnnnnnnnnnnnnnnnnnnnnnnnnnnnnnnnnnnnnnnnnnnnnnnnnnnnnnnnnnnnnnnnnnnnnnnnnnnnnnnnnnnnnnnnnnnnnnnnnnnnnnnnnnnnnnnnnnnnnnnnnnnnnnnnnnnnnnnnnnnnnnnnnnnnnnnnnnnnnnnnnnnnnnnnnnnnnnnnnnnnnnnnnnnnnnnnnnnnnnnnnnnnnnnnnnnnnnnnnnnnnnnnnnnnnnnnnnnnnnnnnnnnnnnnnnnnnnnnnnnnnnnnnnnnnnnnnnnnnnnnnnnnnnnnnnnnnnnnnnnnnnnnnnnnnnnnnnnnnnnnnnnnnnnnnnnnnnnnnnnnnnnnnnnnnnnnnnnnnnnnnnnnnnnnnnnnnnnnnnnnnnnnnnnnnnnnnnnnnnnnnnnnnnnnnnnnnnnnnnnnnnnnnnnnnnnnnnnnnnnnnnnnnnnnnnnnnnnnnnnnnnnnnnnnnnnnnnnnnnnnnnnnnnnnnnnnnnnnnnnnnnnnnnnnnnnnnnnnnnnnnnnnnnnnnnnnnnnnnnnnnnnnnnnnnnnnnnnnnnnnnnnnnnnnnnnnnnnnnnnnnnnnnnnnnnnnnnnnnnnnnnnnnnnnnnnnnnnnnnnnnnnnnnnnnnnnnnnnnnnnnnnnnnnnnnnnnnnnnnnnnnnnnnnnnnnnnnnnnnnnnnnnnnnnnnnnnnnnnnnnnnnnnnnnnnnnnnnnnnnnnnnnnnnnnnnnnnnnnnnnnnnnnnnnnnnnnnnnnnnnnnnnnnnnnnnnnnnnnnnnnnnnnnnnnnnnnnnnnnnnnnnnnnnnnnnnnnnnnnnnnnnnnnnnnnnnnnnnnnnnnnnnnnnnnnnnnnnnnnnnnnnnnnnnnnnnnnnnnnnnnnnnnnnnnnnnnnnnnnnnnnnnnnnnnnnnnnnnnnnnnnnnnnnnnnnnnnnnnnnnnnnnnnnnnnnnnnnnnnnnnnnnnnnnnnnnnnnnnnnnnnnnnnnnnnnnnnnnnnnnnnnnnnnnnnnnnnnnnnnnnnnnnnnnnnnnnnnnnnnnnnnnnnnnnnnnnnnnnnnnnnnnnnnnnnnnnnnnnnnnnnnnnnnnnnnnnnnnnnnnnnnnnnnnnnggacuagugaagggaacacccaaauuuaauucagccuuaagcacaauuaauuaagagugaaacguaauuguacaagcaguuggucacccaccauagggcaugaucaacaccgcaaccuuuccuuuuucccccagugauucugaaaaaccccucuucccuucagcuugcuuagauguuccaaauuuaguaagcuuaaggcggccuacagaagaaaaagaaaaaaaaggccacaaaaguucccucucacuuucaguaaauaaaauaaaagcagcaacagaaauaaagaaauaaaugaaauucaaaaugaaauaaauauuguguugugcagcauuaaaaaaucaauaaaaauuaaaaaugagcaagaucuaaaaaaaaaaaaaaaaaaaaaaaaaaaaaaaaaaaaaaaaaaaaaaaaaaaaaaaaaaaaaaaaugcaucccccccccccccccccccccccccccccccaaaggcucuuuucagagccaccagaauu

SEQ ID NO: 299 - RNA, 1949 nt, Artificial Sequence
  mRNA product Rpl31_RAV-G(GC)_Ndufa1_A64-C30-histoneSL
gggagacccgugacccggaaguuguacggcuacgcgacuuucccucccacaaacccucgcgcccuuccuuuccuacuugggcccggcagaaagcuuaccauggugccccaggcccuccuguucgucccgcugcugguguucccccucugcuucggcaaguuccccaucuacaccauccccgacaagcuggggccguggagccccaucgacauccaccaccuguccugccccaacaaccucguggucgaggacgagggcugcaccaaccugagcggguucuccuacauggagcugaaggugggcuacaucagcgccaucaagaugaacggguucacgugcaccggcguggucaccgaggcggagaccuacacgaacuucgugggcuacgugaccaccaccuucaagcggaagcacuuccgccccacgccggacgccugccgggccgccuacaacuggaagauggccggggacccccgcuacgaggagucccuccacaaccccuaccccgacuaccacuggcugcggaccgucaagaccaccaaggagagccuggugaucaucuccccgagcguggcggaccucgaccccuacgaccgcucccugcacagccgggucuuccccggcgggaacugcuccggcguggccgugagcuccacguacugcagcaccaaccacgacuacaccaucuggaugcccgagaacccgcgccuggggauguccugcgacaucuucaccaacagccggggcaagcgcgccuccaagggcagcgagacgugcggguucgucgacgagcggggccucuacaagucccugaagggggccugcaagcugaagcucugcggcgugcugggccugcgccucauggacgggaccuggguggcgaugcagaccagcaacgagaccaaguggugcccccccggccagcuggucaaccugcacgacuuccggagcgacgagaucgagcaccucgugguggaggagcuggucaagaagcgcgaggagugccuggacgcccucgaguccaucaugacgaccaagagcguguccuuccggcgccugagccaccuccggaagcuggugcccggguucggcaaggccuacaccaucuucaacaagacccugauggaggccgacgcccacuacaaguccguccgcacguggaacgagaucaucccgagcaaggggugccugcgggugggcggccgcugccacccccacgucaacgggguguucuucaacggcaucauccucgggcccgacggcaacgugcugauccccgagaugcaguccagccugcuccagcagcacauggagcugcuggucuccagcgugaucccgcucaugcacccccuggcggaccccuccaccguguucaagaacggggacgaggccgaggacuucgucgaggugcaccuccccgacgugcacgagcggaucagcggcgucgaccugggccugccgaacugggggaaguacgugcugcucuccgccggcgcccugaccgcccugaugcugaucaucuuccucaugaccugcuggcgccgggugaaccggagcgagcccacgcagcacaaccugcgcgggaccggccgggaggucuccgugaccccgcagagcgggaagaucaucuccagcugggaguccuacaagagcggcggcgagaccgggcugugaggacuaguggaagcauuuuccuggcugauuaaaagaaauuacucagcuauggucaucuguuccuguuagaaggcuaugcagcauauuauauacuaugcgcauguuaugaaaugcauaauaaaaaauuuuaaaaaaucuaaaagaucuaaaaaaaaaaaaaaaaaaaaaaaaaaaaaaaaaaaaaaaaaaaaaaaaaaaaaaaaaaaaaaaaugcaucccccccccccccccccccccccccccccccaaaggcucuuuucagagccaccagaauu

SEQ ID NO: 300 - RNA, 1890 nt, Artificial Sequence
  mRNA product Rpl31_RAV-G(GC)_Ndufa1_A64
gggagacccgugacccggaaguuguacggcuacgcgacuuucccucccacaaacccucgcgcccuuccuuuccuacuugggcccggcagaaagcuuaccauggugccccaggcccuccuguucgucccgcugcugguguucccccucugcuucggcaaguuccccaucuacaccauccccgacaagcuggggccguggagccccaucgacauccaccaccuguccugccccaacaaccucguggucgaggacgagggcugcaccaaccugagcggguucuccuacauggagcugaaggugggcuacaucagcgccaucaagaugaacggguucacgugcaccggcguggucaccgaggcggagaccuacacgaacuucgugggcuacgugaccaccaccuucaagcggaagcacuuccgccccacgccggacgccugccgggccgccuacaacuggaagauggccggggacccccgcuacgaggagucccuccacaaccccuaccccgacuaccacuggcugcggaccgucaagaccaccaaggagagccuggugaucaucuccccgagcguggcggaccucgaccccuacgaccgcucccugcacagccgggucuuccccggcgggaacugcuccggcguggccgugagcuccacguacugcagcaccaaccacgacuacaccaucuggaugcccgagaacccgcgccuggggauguccugcgacaucuucaccaacagccggggcaagcgcgccuccaagggcagcgagacgugcggguucgucgacgagcggggccucuacaagucccugaagggggccugcaagcugaagcucugcggcgugcugggccugcgccucauggacgggaccuggguggcgaugcagaccagcaacgagaccaaguggugcccccccggccagcuggucaaccugcacgacuuccggagcgacgagaucgagcaccucgugguggaggagcuggucaagaagcgcgaggagugccuggacgcccucgaguccaucaugacgaccaagagcguguccuuccggcgccugagccaccuccggaagcuggugcccggguucggcaaggccuacaccaucuucaacaagacccugauggaggccgacgcccacuacaaguccguccgcacguggaacgagaucaucccgagcaaggggugccugcgggugggcggccgcugccacccccacgucaacgggguguucuucaacggcaucauccucgggcccgacggcaacgugcugauccccgagaugcaguccagccugcuccagcagcacauggagcugcuggucuccagcgugaucccgcucaugcacccccuggcggaccccuccaccguguucaagaacggggacgaggccgaggacuucgucgaggugcaccuccccgacgugcacgagcggaucagcggcgucgaccugggccugccgaacugggggaaguacgugcugcucuccgccggcgcccugaccgcccugaugcugaucaucuuccucaugaccugcuggcgccgggugaaccggagcgagcccacgcagcacaaccugcgcgggaccggccgggaggucuccgugaccccgcagagcgggaagaucaucuccagcugggaguccuacaagagcggcggcgagaccgggcugugaggacuaguggaagcauuuuccuggcugauuaaaagaaauuacucagcuauggucaucuguuccuguuagaaggcuaugcagcauauuauauacuaugcgcauguuaugaaaugcauaauaaaaaauuuuaaaaaaucuaaaagaucuaaaaaaaaaaaaaaaaaaaaaaaaaaaaaaaaaaaaaaaaaaaaaaaaaaaaaaaaaaaaaaaagaauu

SEQ ID NO: 301 - RNA, 956 nt, Artificial Sequence
  mRNA product Rpl31_HsEPO(GC)_Ndufa1_A64-C30-histoneSL
gggagacccgugacccggaaguuguacggcuacgcgacuuucccucccacaaacccucgcgcccuuccuuuccuacuugggcccggcagaaagcuuaccaugggcgugcacgagugccccgccuggcuguggcuccugcugagccuccugucccugccgcucgggcugcccguccugggcgcccccccgcggcucaucugcgacagccgcgugcuggagcgguaccugcucgaggcgaaggaggccgagaacaucaccaccgggugcgccgagcacugcucccugaacgagaacaucacggugccggacaccaaggucaacuucuacgccuggaagcgcauggaggugggccagcaggccguggaggucuggcaggggcuggcgcuccugagcgaggccgugcugcggggccaggcccuccuggugaacuccagccagcccugggagccccugcagcuccacgucgacaaggccguguccggccugcgcagccugaccacccuccugcgggcgcugggggcccagaaggaggccaucucccccccggacgccgccagcgcggccccgcuccgcacgaucaccgccgacaccuuccggaagcuguuccgcguguacuccaacuuccugcggggcaagcucaagcuguacaccggggaggccugccgcacgggcgaccggugaggacuaguggaagcauuuuccuggcugauuaaaagaaauuacucagcuauggucaucuguuccuguuagaaggcuaugcagcauauuauauacuaugcgcauguuaugaaaugcauaauaaaaaauuuuaaaaaaucuaaaagaucuaaaaaaaaaaaaaaaaaaaaaaaaaaaaaaaaaaaaaaaaaaaaaaaaaaaaaaaaaaaaaaaaugcaucccccccccccccccccccccccccccccccaaaggcucuuuucagagccaccagaauu

SEQ ID NO: 302 - RNA, 897 nt, Artificial Sequence
  mRNA product Rpl31_HsEPO(GC)_Ndufa1_A64
gggagacccgugacccggaaguuguacggcuacgcgacuuucccucccacaaacccucgcgcccuuccuuuccuacuugggcccggcagaaagcuuaccaugggcgugcacgagugccccgccuggcuguggcuccugcugagccuccugucccugccgcucgggcugcccguccugggcgcccccccgcggcucaucugcgacagccgcgugcuggagcgguaccugcucgaggcgaaggaggccgagaacaucaccaccgggugcgccgagcacugcucccugaacgagaacaucacggugccggacaccaaggucaacuucuacgccuggaagcgcauggaggugggccagcaggccguggaggucuggcaggggcuggcgcuccugagcgaggccgugcugcggggccaggcccuccuggugaacuccagccagcccugggagccccugcagcuccacgucgacaaggccguguccggccugcgcagccugaccacccuccugcgggcgcugggggcccagaaggaggccaucucccccccggacgccgccagcgcggccccgcuccgcacgaucaccgccgacaccuuccggaagcuguuccgcguguacuccaacuuccugcggggcaagcucaagcuguacaccggggaggccugccgcacgggcgaccggugaggacuaguggaagcauuuuccuggcugauuaaaagaaauuacucagcuauggucaucuguuccuguuagaaggcuaugcagcauauuauauacuaugcgcauguuaugaaaugcauaauaaaaaauuuuaaaaaaucuaaaagaucuaaaaaaaaaaaaaaaaaaaaaaaaaaaaaaaaaaaaaaaaaaaaaaaaaaaaaaaaaaaaaaaagaauu

SEQ ID NO: 303 - RNA, 2027 nt, Artificial Sequence
  mRNA product Rpl31_PpLuc(GC)_Ndufa1_A64-C30-histoneSL
gggagacccgugacccggaaguuguacggcuacgcgacuuucccucccacaaacccucgcgcccuuccuuuccuacuugggcccggcagaaagcuuaccauggaggacgccaagaacaucaagaagggcccggcgcccuucuacccgcuggaggacgggaccgccggcgagcagcuccacaaggccaugaagcgguacgcccuggugccgggcacgaucgccuucaccgacgcccacaucgaggucgacaucaccuacgcggaguacuucgagaugagcgugcgccuggccgaggccaugaagcgguacggccugaacaccaaccaccggaucguggugugcucggagaacagccugcaguucuucaugccggugcugggcgcccucuucaucggcguggccgucgccccggcgaacgacaucuacaacgagcgggagcugcugaacagcauggggaucagccagccgaccgugguguucgugagcaagaagggccugcagaagauccugaacgugcagaagaagcugcccaucauccagaagaucaucaucauggacagcaagaccgacuaccagggcuuccagucgauguacacguucgugaccagccaccucccgccgggcuucaacgaguacgacuucgucccggagagcuucgaccgggacaagaccaucgcccugaucaugaacagcagcggcagcaccggccugccgaaggggguggcccugccgcaccggaccgccugcgugcgcuucucgcacgcccgggaccccaucuucggcaaccagaucaucccggacaccgccauccugagcguggugccguuccaccacggcuucggcauguucacgacccugggcuaccucaucugcggcuuccgggugguccugauguaccgguucgaggaggagcuguuccugcggagccugcaggacuacaagauccagagcgcgcugcucgugccgacccuguucagcuucuucgccaagagcacccugaucgacaaguacgaccugucgaaccugcacgagaucgccagcgggggcgccccgcugagcaaggaggugggcgaggccguggccaagcgguuccaccucccgggcauccgccagggcuacggccugaccgagaccacgagcgcgauccugaucacccccgagggggacgacaagccgggcgccgugggcaagguggucccguucuucgaggccaaggugguggaccuggacaccggcaagacccugggcgugaaccagcggggcgagcugugcgugcgggggccgaugaucaugagcggcuacgugaacaacccggaggccaccaacgcccucaucgacaaggacggcuggcugcacagcggcgacaucgccuacugggacgaggacgagcacuucuucaucgucgaccggcugaagucgcugaucaaguacaagggcuaccagguggcgccggccgagcuggagagcauccugcuccagcaccccaacaucuucgacgccggcguggccgggcugccggacgacgacgccggcgagcugccggccgcggugguggugcuggagcacggcaagaccaugacggagaaggagaucgucgacuacguggccagccaggugaccaccgccaagaagcugcggggcggcgugguguucguggacgaggucccgaagggccugaccgggaagcucgacgcccggaagauccgcgagauccugaucaaggccaagaagggcggcaagaucgccgugugaggacuaguggaagcauuuuccuggcugauuaaaagaaauuacucagcuauggucaucuguuccuguuagaaggcuaugcagcauauuauauacuaugcgcauguuaugaaaugcauaauaaaaaauuuuaaaaaaucuaaaagaucuaaaaaaaaaaaaaaaaaaaaaaaaaaaaaaaaaaaaaaaaaaaaaaaaaaaaaaaaaaaaaaaaugcaucccccccccccccccccccccccccccccccaaaggcucuuuucagagccaccagaauu

SEQ ID NO: 304 - RNA, 1968 nt, Artificial Sequence
  mRNA product Rpl31_PpLuc(GC)_Ndufa1_A64
gggagacccgugacccggaaguuguacggcuacgcgacuuucccucccacaaacccucgcgcccuuccuuuccuacuugggcccggcagaaagcuuaccauggaggacgccaagaacaucaagaagggcccggcgcccuucuacccgcuggaggacgggaccgccggcgagcagcuccacaaggccaugaagcgguacgcccuggugccgggcacgaucgccuucaccgacgcccacaucgaggucgacaucaccuacgcggaguacuucgagaugagcgugcgccuggccgaggccaugaagcgguacggccugaacaccaaccaccggaucguggugugcucggagaacagccugcaguucuucaugccggugcugggcgcccucuucaucggcguggccgucgccccggcgaacgacaucuacaacgagcgggagcugcugaacagcauggggaucagccagccgaccgugguguucgugagcaagaagggccugcagaagauccugaacgugcagaagaagcugcccaucauccagaagaucaucaucauggacagcaagaccgacuaccagggcuuccagucgauguacacguucgugaccagccaccucccgccgggcuucaacgaguacgacuucgucccggagagcuucgaccgggacaagaccaucgcccugaucaugaacagcagcggcagcaccggccugccgaaggggguggcccugccgcaccggaccgccugcgugcgcuucucgcacgcccgggaccccaucuucggcaaccagaucaucccggacaccgccauccugagcguggugccguuccaccacggcuucggcauguucacgacccugggcuaccucaucugcggcuuccgggugguccugauguaccgguucgaggaggagcuguuccugcggagccugcaggacuacaagauccagagcgcgcugcucgugccgacccuguucagcuucuucgccaagagcacccugaucgacaaguacgaccugucgaaccugcacgagaucgccagcgggggcgccccgcugagcaaggaggugggcgaggccguggccaagcgguuccaccucccgggcauccgccagggcuacggccugaccgagaccacgagcgcgauccugaucacccccgagggggacgacaagccgggcgccgugggcaagguggucccguucuucgaggccaaggugguggaccuggacaccggcaagacccugggcgugaaccagcggggcgagcugugcgugcgggggccgaugaucaugagcggcuacgugaacaacccggaggccaccaacgcccucaucgacaaggacggcuggcugcacagcggcgacaucgccuacugggacgaggacgagcacuucuucaucgucgaccggcugaagucgcugaucaaguacaagggcuaccagguggcgccggccgagcuggagagcauccugcuccagcaccccaacaucuucgacgccggcguggccgggcugccggacgacgacgccggcgagcugccggccgcggugguggugcuggagcacggcaagaccaugacggagaaggagaucgucgacuacguggccagccaggugaccaccgccaagaagcugcggggcggcgugguguucguggacgaggucccgaagggccugaccgggaagcucgacgcccggaagauccgcgagauccugaucaaggccaagaagggcggcaagaucgccgugugaggacuaguggaagcauuuuccuggcugauuaaaagaaauuacucagcuauggucaucuguuccuguuagaaggcuaugcagcauauuauauacuaugcgcauguuaugaaaugcauaauaaaaaauuuuaaaaaaucuaaaagaucuaaaaaaaaaaaaaaaaaaaaaaaaaaaaaaaaaaaaaaaaaaaaaaaaaaaaaaaaaaaaaaaagaauu

SEQ ID NO: 305 - RNA, 2036 nt, Artificial Sequence
  mRNA product Rpl31_protein of interest example 5_Ndufa1_A64-C30-histoneSL
  misc_feature (100)..(1761): n is a, c, g, or u
gggagacccgugacccggaaguuguacggcuacgcgacuuucccucccacaaacccucgcgcccuuccuuuccuacuugggcccggcagaaagcuuaccnnnnnnnnnnnnnnnnnnnnnnnnnnnnnnnnnnnnnnnnnnnnnnnnnnnnnnnnnnnnnnnnnnnnnnnnnnnnnnnnnnnnnnnnnnnnnnnnnnnnnnnnnnnnnnnnnnnnnnnnnnnnnnnnnnnnnnnnnnnnnnnnnnnnnnnnnnnnnnnnnnnnnnnnnnnnnnnnnnnnnnnnnnnnnnnnnnnnnnnnnnnnnnnnnnnnnnnnnnnnnnnnnnnnnnnnnnnnnnnnnnnnnnnnnnnnnnnnnnnnnnnnnnnnnnnnnnnnnnnnnnnnnnnnnnnnnnnnnnnnnnnnnnnnnnnnnnnnnnnnnnnnnnnnnnnnnnnnnnnnnnnnnnnnnnnnnnnnnnnnnnnnnnnnnnnnnnnnnnnnnnnnnnnnnnnnnnnnnnnnnnnnnnnnnnnnnnnnnnnnnnnnnnnnnnnnnnnnnnnnnnnnnnnnnnnnnnnnnnnnnnnnnnnnnnnnnnnnnnnnnnnnnnnnnnnnnnnnnnnnnnnnnnnnnnnnnnnnnnnnnnnnnnnnnnnnnnnnnnnnnnnnnnnnnnnnnnnnnnnnnnnnnnnnnnnnnnnnnnnnnnnnnnnnnnnnnnnnnnnnnnnnnnnnnnnnnnnnnnnnnnnnnnnnnnnnnnnnnnnnnnnnnnnnnnnnnnnnnnnnnnnnnnnnnnnnnnnnnnnnnnnnnnnnnnnnnnnnnnnnnnnnnnnnnnnnnnnnnnnnnnnnnnnnnnnnnnnnnnnnnnnnnnnnnnnnnnnnnnnnnnnnnnnnnnnnnnnnnnnnnnnnnnnnnnnnnnnnnnnnnnnnnnnnnnnnnnnnnnnnnnnnnnnnnnnnnnnnnnnnnnnnnnnnnnnnnnnnnnnnnnnnnnnnnnnnnnnnnnnnnnnnnnnnnnnnnnnnnnnnnnnnnnnnnnnnnnnnnnnnnnnnnnnnnnnnnnnnnnnnnnnnnnnnnnnnnnnnnnnnnnnnnnnnnnnnnnnnnnnnnnnnnnnnnnnnnnnnnnnnnnnnnnnnnnnnnnnnnnnnnnnnnnnnnnnnnnnnnnnnnnnnnnnnnnnnnnnnnnnnnnnnnnnnnnnnnnnnnnnnnnnnnnnnnnnnnnnnnnnnnnnnnnnnnnnnnnnnnnnnnnnnnnnnnnnnnnnnnnnnnnnnnnnnnnnnnnnnnnnnnnnnnnnnnnnnnnnnnnnnnnnnnnnnnnnnnnnnnnnnnnnnnnnnnnnnnnnnnnnnnnnnnnnnnnnnnnnnnnnnnnnnnnnnnnnnnnnnnnnnnnnnnnnnnnnnnnnnnnnnnnnnnnnnnnnnnnnnnnnnnnnnnnnnnnnnnnnnnnnnnnnnnnnnnnnnnnnnnnnnnnnnnnnnnnnnnnnnnnnnnnnnnnnnnnnnnnnnnnnnnnnnnnnnnnnnnnnnnnnnnnnnnnnnnnnnnnnnnnnnnnnnnnnnnnnnnnnnnnnnnnnnnnnnnnnnnnnnnnnnnnnnnnnnnnnnnnnnnnnnnnnnnnnnnnnnnnnnnnnnnnnnnnnnnnnnnnnnnnnnnnnnnnnnnnnnnnnnnnnnnnnnnnnnnnnnnnnnnnnnnnnnnnnnnnnnnnnnnnnnnnnnnnnnnnnnnnnnnnnnnnnnnnnnnnnnnnnnnnnnnnnnnnnnnnnnnnnnnnnnnnnnnnnnnnnnnnnnnnnnnnggacuaguggaagcauuuuccuggcugauuaaaagaaauuacucagcuauggucaucuguuccuguuagaaggcuaugcagcauauuauauacuaugcgcauguuaugaaaugcauaauaaaaaauuuuaaaaaaucuaaaagaucuaaaaaaaaaaaaaaaaaaaaaaaaaaaaaaaaaaaaaaaaaaaaaaaaaaaaaaaaaaaaaaaaugcaucccccccccccccccccccccccccccccccaaaggcucuuuucagagccaccagaauu

SEQ ID NO: 306 - RNA, 1886 nt, Artificial Sequence
  mRNA product Rpl31_RAV-G(GC)_RPS9_A64-C30-histoneSL
gggagacccgugacccggaaguuguacggcuacgcgacuuucccucccacaaacccucgcgcccuuccuuuccuacuugggcccggcagaaagcuuaccauggugccccaggcccuccuguucgucccgcugcugguguucccccucugcuucggcaaguuccccaucuacaccauccccgacaagcuggggccguggagccccaucgacauccaccaccuguccugccccaacaaccucguggucgaggacgagggcugcaccaaccugagcggguucuccuacauggagcugaaggugggcuacaucagcgccaucaagaugaacggguucacgugcaccggcguggucaccgaggcggagaccuacacgaacuucgugggcuacgugaccaccaccuucaagcggaagcacuuccgccccacgccggacgccugccgggccgccuacaacuggaagauggccggggacccccgcuacgaggagucccuccacaaccccuaccccgacuaccacuggcugcggaccgucaagaccaccaaggagagccuggugaucaucuccccgagcguggcggaccucgaccccuacgaccgcucccugcacagccgggucuuccccggcgggaacugcuccggcguggccgugagcuccacguacugcagcaccaaccacgacuacaccaucuggaugcccgagaacccgcgccuggggauguccugcgacaucuucaccaacagccggggcaagcgcgccuccaagggcagcgagacgugcggguucgucgacgagcggggccucuacaagucccugaagggggccugcaagcugaagcucugcggcgugcugggccugcgccucauggacgggaccuggguggcgaugcagaccagcaacgagaccaaguggugcccccccggccagcuggucaaccugcacgacuuccggagcgacgagaucgagcaccucgugguggaggagcuggucaagaagcgcgaggagugccuggacgcccucgaguccaucaugacgaccaagagcguguccuuccggcgccugagccaccuccggaagcuggugcccggguucggcaaggccuacaccaucuucaacaagacccugauggaggccgacgcccacuacaaguccguccgcacguggaacgagaucaucccgagcaaggggugccugcgggugggcggccgcugccacccccacgucaacgggguguucuucaacggcaucauccucgggcccgacggcaacgugcugauccccgagaugcaguccagccugcuccagcagcacauggagcugcuggucuccagcgugaucccgcucaugcacccccuggcggaccccuccaccguguucaagaacggggacgaggccgaggacuucgucgaggugcaccuccccgacgugcacgagcggaucagcggcgucgaccugggccugccgaacugggggaaguacgugcugcucuccgccggcgcccugaccgcccugaugcugaucaucuuccucaugaccugcuggcgccgggugaaccggagcgagcccacgcagcacaaccugcgcgggaccggccgggaggucuccgugaccccgcagagcgggaagaucaucuccagcugggaguccuacaagagcggcggcgagaccgggcugugaggacuaguguccaccugucccuccugggcugcuggauugucucguuuuccugccaaauaaacaggaucagcgcuuuacagaucuaaaaaaaaaaaaaaaaaaaaaaaaaaaaaaaaaaaaaaaaaaaaaaaaaaaaaaaaaaaaaaaaugcaucccccccccccccccccccccccccccccccaaaggcucuuuucagagccaccagaauu

SEQ ID NO: 307 - RNA, 1827 nt, Artificial Sequence
  mRNA product Rpl31_RAV-G(GC)_RPS9_A64
gggagacccgugacccggaaguuguacggcuacgcgacuuucccucccacaaacccucgcgcccuuccuuuccuacuugggcccggcagaaagcuuaccauggugccccaggcccuccuguucgucccgcugcugguguucccccucugcuucggcaaguuccccaucuacaccauccccgacaagcuggggccguggagccccaucgacauccaccaccuguccugccccaacaaccucguggucgaggacgagggcugcaccaaccugagcggguucuccuacauggagcugaaggugggcuacaucagcgccaucaagaugaacggguucacgugcaccggcguggucaccgaggcggagaccuacacgaacuucgugggcuacgugaccaccaccuucaagcggaagcacuuccgccccacgccggacgccugccgggccgccuacaacuggaagauggccggggacccccgcuacgaggagucccuccacaaccccuaccccgacuaccacuggcugcggaccgucaagaccaccaaggagagccuggugaucaucuccccgagcguggcggaccucgaccccuacgaccgcucccugcacagccgggucuuccccggcgggaacugcuccggcguggccgugagcuccacguacugcagcaccaaccacgacuacaccaucuggaugcccgagaacccgcgccuggggauguccugcgacaucuucaccaacagccggggcaagcgcgccuccaagggcagcgagacgugcggguucgucgacgagcggggccucuacaagucccugaagggggccugcaagcugaagcucugcggcgugcugggccugcgccucauggacgggaccuggguggcgaugcagaccagcaacgagaccaaguggugcccccccggccagcuggucaaccugcacgacuuccggagcgacgagaucgagcaccucgugguggaggagcuggucaagaagcgcgaggagugccuggacgcccucgaguccaucaugacgaccaagagcguguccuuccggcgccugagccaccuccggaagcuggugcccggguucggcaaggccuacaccaucuucaacaagacccugauggaggccgacgcccacuacaaguccguccgcacguggaacgagaucaucccgagcaaggggugccugcgggugggcggccgcugccacccccacgucaacgggguguucuucaacggcaucauccucgggcccgacggcaacgugcugauccccgagaugcaguccagccugcuccagcagcacauggagcugcuggucuccagcgugaucccgcucaugcacccccuggcggaccccuccaccguguucaagaacggggacgaggccgaggacuucgucgaggugcaccuccccgacgugcacgagcggaucagcggcgucgaccugggccugccgaacugggggaaguacgugcugcucuccgccggcgcccugaccgcccugaugcugaucaucuuccucaugaccugcuggcgccgggugaaccggagcgagcccacgcagcacaaccugcgcgggaccggccgggaggucuccgugaccccgcagagcgggaagaucaucuccagcugggaguccuacaagagcggcggcgagaccgggcugugaggacuaguguccaccugucccuccugggcugcuggauugucucguuuuccugccaaauaaacaggaucagcgcuuuacagaucuaaaaaaaaaaaaaaaaaaaaaaaaaaaaaaaaaaaaaaaaaaaaaaaaaaaaaaaaaaaaaaaagaauu

SEQ ID NO: 308 - RNA, 893 nt, Artificial Sequence
  mRNA product Rpl31_HsEPO(GC)_RPS9_A64-C30-histoneSL
gggagacccgugacccggaaguuguacggcuacgcgacuuucccucccacaaacccucgcgcccuuccuuuccuacuugggcccggcagaaagcuuaccaugggcgugcacgagugccccgccuggcuguggcuccugcugagccuccugucccugccgcucgggcugcccguccugggcgcccccccgcggcucaucugcgacagccgcgugcuggagcgguaccugcucgaggcgaaggaggccgagaacaucaccaccgggugcgccgagcacugcucccugaacgagaacaucacggugccggacaccaaggucaacuucuacgccuggaagcgcauggaggugggccagcaggccguggaggucuggcaggggcuggcgcuccugagcgaggccgugcugcggggccaggcccuccuggugaacuccagccagcccugggagccccugcagcuccacgucgacaaggccguguccggccugcgcagccugaccacccuccugcgggcgcugggggcccagaaggaggccaucucccccccggacgccgccagcgcggccccgcuccgcacgaucaccgccgacaccuuccggaagcuguuccgcguguacuccaacuuccugcggggcaagcucaagcuguacaccggggaggccugccgcacgggcgaccggugaggacuaguguccaccugucccuccugggcugcuggauugucucguuuuccugccaaauaaacaggaucagcgcuuuacagaucuaaaaaaaaaaaaaaaaaaaaaaaaaaaaaaaaaaaaaaaaaaaaaaaaaaaaaaaaaaaaaaaaugcaucccccccccccccccccccccccccccccccaaaggcucuuuucagagccaccagaauu

SEQ ID NO: 309 - RNA, 834 nt, Artificial Sequence
  mRNA product Rpl31_HsEPO(GC)_RPS9_A64
gggagacccgugacccggaaguuguacggcuacgcgacuuucccucccacaaacccucgcgcccuuccuuuccuacuugggcccggcagaaagcuuaccaugggcgugcacgagugccccgccuggcuguggcuccugcugagccuccugucccugccgcucgggcugcccguccugggcgcccccccgcggcucaucugcgacagccgcgugcuggagcgguaccugcucgaggcgaaggaggccgagaacaucaccaccgggugcgccgagcacugcucccugaacgagaacaucacggugccggacaccaaggucaacuucuacgccuggaagcgcauggaggugggccagcaggccguggaggucuggcaggggcuggcgcuccugagcgaggccgugcugcggggccaggcccuccuggugaacuccagccagcccugggagccccugcagcuccacgucgacaaggccguguccggccugcgcagccugaccacccuccugcgggcgcugggggcccagaaggaggccaucucccccccggacgccgccagcgcggccccgcuccgcacgaucaccgccgacaccuuccggaagcuguuccgcguguacuccaacuuccugcggggcaagcucaagcuguacaccggggaggccugccgcacgggcgaccggugaggacuaguguccaccugucccuccugggcugcuggauugucucguuuuccugccaaauaaacaggaucagcgcuuuacagaucuaaaaaaaaaaaaaaaaaaaaaaaaaaaaaaaaaaaaaaaaaaaaaaaaaaaaaaaaaaaaaaaagaauu

SEQ ID NO: 310 - RNA, 1964 nt, Artificial Sequence
  mRNA product Rpl31_PpLuc(GC)_RPS9_A64-C30-histoneSL
gggagacccgugacccggaaguuguacggcuacgcgacuuucccucccacaaacccucgcgcccuuccuuuccuacuugggcccggcagaaagcuuaccauggaggacgccaagaacaucaagaagggcccggcgcccuucuacccgcuggaggacgggaccgccggcgagcagcuccacaaggccaugaagcgguacgcccuggugccgggcacgaucgccuucaccgacgcccacaucgaggucgacaucaccuacgcggaguacuucgagaugagcgugcgccuggccgaggccaugaagcgguacggccugaacaccaaccaccggaucguggugugcucggagaacagccugcaguucuucaugccggugcugggcgcccucuucaucggcguggccgucgccccggcgaacgacaucuacaacgagcgggagcugcugaacagcauggggaucagccagccgaccgugguguucgugagcaagaagggccugcagaagauccugaacgugcagaagaagcugcccaucauccagaagaucaucaucauggacagcaagaccgacuaccagggcuuccagucgauguacacguucgugaccagccaccucccgccgggcuucaacgaguacgacuucgucccggagagcuucgaccgggacaagaccaucgcccugaucaugaacagcagcggcagcaccggccugccgaaggggguggcccugccgcaccggaccgccugcgugcgcuucucgcacgcccgggaccccaucuucggcaaccagaucaucccggacaccgccauccugagcguggugccguuccaccacggcuucggcauguucacgacccugggcuaccucaucugcggcuuccgggugguccugauguaccgguucgaggaggagcuguuccugcggagccugcaggacuacaagauccagagcgcgcugcucgugccgacccuguucagcuucuucgccaagagcacccugaucgacaaguacgaccugucgaaccugcacgagaucgccagcgggggcgccccgcugagcaaggaggugggcgaggccguggccaagcgguuccaccucccgggcauccgccagggcuacggccugaccgagaccacgagcgcgauccugaucacccccgagggggacgacaagccgggcgccgugggcaagguggucccguucuucgaggccaaggugguggaccuggacaccggcaagacccugggcgugaaccagcggggcgagcugugcgugcgggggccgaugaucaugagcggcuacgugaacaacccggaggccaccaacgcccucaucgacaaggacggcuggcugcacagcggcgacaucgccuacugggacgaggacgagcacuucuucaucgucgaccggcugaagucgcugaucaaguacaagggcuaccagguggcgccggccgagcuggagagcauccugcuccagcaccccaacaucuucgacgccggcguggccgggcugccggacgacgacgccggcgagcugccggccgcggugguggugcuggagcacggcaagaccaugacggagaaggagaucgucgacuacguggccagccaggugaccaccgccaagaagcugcggggcggcgugguguucguggacgaggucccgaagggccugaccgggaagcucgacgcccggaagauccgcgagauccugaucaaggccaagaagggcggcaagaucgccgugugaggacuaguguccaccugucccuccugggcugcuggauugucucguuuuccugccaaauaaacaggaucagcgcuuuacagaucuaaaaaaaaaaaaaaaaaaaaaaaaaaaaaaaaaaaaaaaaaaaaaaaaaaaaaaaaaaaaaaaaugcaucccccccccccccccccccccccccccccccaaaggcucuuuucagagccaccagaauu

SEQ ID NO: 311 - RNA, 1905 nt, Artificial Sequence
  mRNA product Rpl31_PpLuc(GC)_RPS9_A64
gggagacccgugacccggaaguuguacggcuacgcgacuuucccucccacaaacccucgcgcccuuccuuuccuacuugggcccggcagaaagcuuaccauggaggacgccaagaacaucaagaagggcccggcgcccuucuacccgcuggaggacgggaccgccggcgagcagcuccacaaggccaugaagcgguacgcccuggugccgggcacgaucgccuucaccgacgcccacaucgaggucgacaucaccuacgcggaguacuucgagaugagcgugcgccuggccgaggccaugaagcgguacggccugaacaccaaccaccggaucguggugugcucggagaacagccugcaguucuucaugccggugcugggcgcccucuucaucggcguggccgucgccccggcgaacgacaucuacaacgagcgggagcugcugaacagcauggggaucagccagccgaccgugguguucgugagcaagaagggccugcagaagauccugaacgugcagaagaagcugcccaucauccagaagaucaucaucauggacagcaagaccgacuaccagggcuuccagucgauguacacguucgugaccagccaccucccgccgggcuucaacgaguacgacuucgucccggagagcuucgaccgggacaagaccaucgcccugaucaugaacagcagcggcagcaccggccugccgaaggggguggcccugccgcaccggaccgccugcgugcgcuucucgcacgcccgggaccccaucuucggcaaccagaucaucccggacaccgccauccugagcguggugccguuccaccacggcuucggcauguucacgacccugggcuaccucaucugcggcuuccgggugguccugauguaccgguucgaggaggagcuguuccugcggagccugcaggacuacaagauccagagcgcgcugcucgugccgacccuguucagcuucuucgccaagagcacccugaucgacaaguacgaccugucgaaccugcacgagaucgccagcgggggcgccccgcugagcaaggaggugggcgaggccguggccaagcgguuccaccucccgggcauccgccagggcuacggccugaccgagaccacgagcgcgauccugaucacccccgagggggacgacaagccgggcgccgugggcaagguggucccguucuucgaggccaaggugguggaccuggacaccggcaagacccugggcgugaaccagcggggcgagcugugcgugcgggggccgaugaucaugagcggcuacgugaacaacccggaggccaccaacgcccucaucgacaaggacggcuggcugcacagcggcgacaucgccuacugggacgaggacgagcacuucuucaucgucgaccggcugaagucgcugaucaaguacaagggcuaccagguggcgccggccgagcuggagagcauccugcuccagcaccccaacaucuucgacgccggcguggccgggcugccggacgacgacgccggcgagcugccggccgcggugguggugcuggagcacggcaagaccaugacggagaaggagaucgucgacuacguggccagccaggugaccaccgccaagaagcugcggggcggcgugguguucguggacgaggucccgaagggccugaccgggaagcucgacgcccggaagauccgcgagauccugaucaaggccaagaagggcggcaagaucgccgugugaggacuaguguccaccugucccuccugggcugcuggauugucucguuuuccugccaaauaaacaggaucagcgcuuuacagaucuaaaaaaaaaaaaaaaaaaaaaaaaaaaaaaaaaaaaaaaaaaaaaaaaaaaaaaaaaaaaaaaagaauu

SEQ ID NO: 312 - RNA, 1973 nt, Artificial Sequence
  mRNA product Rpl31_protein of interest example 5_RPS9_A64-C30-histoneSL
  misc_feature (100)..(1761): n is a, c, g, or u
gggagacccgugacccggaaguuguacggcuacgcgacuuucccucccacaaacccucgcgcccuuccuuuccuacuugggcccggcagaaagcuuaccnnnnnnnnnnnnnnnnnnnnnnnnnnnnnnnnnnnnnnnnnnnnnnnnnnnnnnnnnnnnnnnnnnnnnnnnnnnnnnnnnnnnnnnnnnnnnnnnnnnnnnnnnnnnnnnnnnnnnnnnnnnnnnnnnnnnnnnnnnnnnnnnnnnnnnnnnnnnnnnnnnnnnnnnnnnnnnnnnnnnnnnnnnnnnnnnnnnnnnnnnnnnnnnnnnnnnnnnnnnnnnnnnnnnnnnnnnnnnnnnnnnnnnnnnnnnnnnnnnnnnnnnnnnnnnnnnnnnnnnnnnnnnnnnnnnnnnnnnnnnnnnnnnnnnnnnnnnnnnnnnnnnnnnnnnnnnnnnnnnnnnnnnnnnnnnnnnnnnnnnnnnnnnnnnnnnnnnnnnnnnnnnnnnnnnnnnnnnnnnnnnnnnnnnnnnnnnnnnnnnnnnnnnnnnnnnnnnnnnnnnnnnnnnnnnnnnnnnnnnnnnnnnnnnnnnnnnnnnnnnnnnnnnnnnnnnnnnnnnnnnnnnnnnnnnnnnnnnnnnnnnnnnnnnnnnnnnnnnnnnnnnnnnnnnnnnnnnnnnnnnnnnnnnnnnnnnnnnnnnnnnnnnnnnnnnnnnnnnnnnnnnnnnnnnnnnnnnnnnnnnnnnnnnnnnnnnnnnnnnnnnnnnnnnnnnnnnnnnnnnnnnnnnnnnnnnnnnnnnnnnnnnnnnnnnnnnnnnnnnnnnnnnnnnnnnnnnnnnnnnnnnnnnnnnnnnnnnnnnnnnnnnnnnnnnnnnnnnnnnnnnnnnnnnnnnnnnnnnnnnnnnnnnnnnnnnnnnnnnnnnnnnnnnnnnnnnnnnnnnnnnnnnnnnnnnnnnnnnnnnnnnnnnnnnnnnnnnnnnnnnnnnnnnnnnnnnnnnnnnnnnnnnnnnnnnnnnnnnnnnnnnnnnnnnnnnnnnnnnnnnnnnnnnnnnnnnnnnnnnnnnnnnnnnnnnnnnnnnnnnnnnnnnnnnnnnnnnnnnnnnnnnnnnnnnnnnnnnnnnnnnnnnnnnnnnnnnnnnnnnnnnnnnnnnnnnnnnnnnnnnnnnnnnnnnnnnnnnnnnnnnnnnnnnnnnnnnnnnnnnnnnnnnnnnnnnnnnnnnnnnnnnnnnnnnnnnnnnnnnnnnnnnnnnnnnnnnnnnnnnnnnnnnnnnnnnnnnnnnnnnnnnnnnnnnnnnnnnnnnnnnnnnnnnnnnnnnnnnnnnnnnnnnnnnnnnnnnnnnnnnnnnnnnnnnnnnnnnnnnnnnnnnnnnnnnnnnnnnnnnnnnnnnnnnnnnnnnnnnnnnnnnnnnnnnnnnnnnnnnnnnnnnnnnnnnnnnnnnnnnnnnnnnnnnnnnnnnnnnnnnnnnnnnnnnnnnnnnnnnnnnnnnnnnnnnnnnnnnnnnnnnnnnnnnnnnnnnnnnnnnnnnnnnnnnnnnnnnnnnnnnnnnnnnnnnnnnnnnnnnnnnnnnnnnnnnnnnnnnnnnnnnnnnnnnnnnnnnnnnnnnnnnnnnnnnnnnnnnnnnnnnnnnnnnnnnnnnnnnnnnnnnnnnnnnnnnnnnnnnnnnnnnnnnnnnnnnnnnnnnnnnnnnnnnnnnnnnnnnnnnnnnnnnnnnnnnnnnnnnnnnnnnnnnnnnnnnnnnnnnnnnnnnnnnnnnnnnnnnnnnnnnnnnnnnnnnnnnnnnnnnggacuaguguccaccugucccuccugggcugcuggauugucucguuuuccugccaaauaaacaggaucagcgcuuuacagaucuaaaaaaaaaaaaaaaaaaaaaaaaaaaaaaaaaaaaaaaaaaaaaaaaaaaaaaaaaaaaaaaaugcaucccccccccccccccccccccccccccccccaaaggcucuuuucagagccaccagaauu

SEQ ID NO: 313 - RNA, 1948 nt, Artificial Sequence
  mRNA product Slc7a3_RAV-G(GC)_PSMB3_A64-C30-histoneSL
gggagagggcgcuuggcuugcaaggacccugagcugcggcauugaagcacacccaacccaacucgacugaagucagccucacugaaccggaucugagaaucuucucucucugggcuugccagggcucuccgaaccuagcuagcauccucuucaauuccaacuagaaagcuuaccauggugccccaggcccuccuguucgucccgcugcugguguucccccucugcuucggcaaguuccccaucuacaccauccccgacaagcuggggccguggagccccaucgacauccaccaccuguccugccccaacaaccucguggucgaggacgagggcugcaccaaccugagcggguucuccuacauggagcugaaggugggcuacaucagcgccaucaagaugaacggguucacgugcaccggcguggucaccgaggcggagaccuacacgaacuucgugggcuacgugaccaccaccuucaagcggaagcacuuccgccccacgccggacgccugccgggccgccuacaacuggaagauggccggggacccccgcuacgaggagucccuccacaaccccuaccccgacuaccacuggcugcggaccgucaagaccaccaaggagagccuggugaucaucuccccgagcguggcggaccucgaccccuacgaccgcucccugcacagccgggucuuccccggcgggaacugcuccggcguggccgugagcuccacguacugcagcaccaaccacgacuacaccaucuggaugcccgagaacccgcgccuggggauguccugcgacaucuucaccaacagccggggcaagcgcgccuccaagggcagcgagacgugcggguucgucgacgagcggggccucuacaagucccugaagggggccugcaagcugaagcucugcggcgugcugggccugcgccucauggacgggaccuggguggcgaugcagaccagcaacgagaccaaguggugcccccccggccagcuggucaaccugcacgacuuccggagcgacgagaucgagcaccucgugguggaggagcuggucaagaagcgcgaggagugccuggacgcccucgaguccaucaugacgaccaagagcguguccuuccggcgccugagccaccuccggaagcuggugcccggguucggcaaggccuacaccaucuucaacaagacccugauggaggccgacgcccacuacaaguccguccgcacguggaacgagaucaucccgagcaaggggugccugcgggugggcggccgcugccacccccacgucaacgggguguucuucaacggcaucauccucgggcccgacggcaacgugcugauccccgagaugcaguccagccugcuccagcagcacauggagcugcuggucuccagcgugaucccgcucaugcacccccuggcggaccccuccaccguguucaagaacggggacgaggccgaggacuucgucgaggugcaccuccccgacgugcacgagcggaucagcggcgucgaccugggccugccgaacugggggaaguacgugcugcucuccgccggcgcccugaccgcccugaugcugaucaucuuccucaugaccugcuggcgccgggugaaccggagcgagcccacgcagcacaaccugcgcgggaccggccgggaggucuccgugaccccgcagagcgggaagaucaucuccagcugggaguccuacaagagcggcggcgagaccgggcugugaggacuagucccuguucccagagcccacuuuuuuuucuuuuuuugaaauaaaauagccugucuuucagaucuaaaaaaaaaaaaaaaaaaaaaaaaaaaaaaaaaaaaaaaaaaaaaaaaaaaaaaaaaaaaaaaaugcaucccccccccccccccccccccccccccccccaaaggcucuuuucagagccaccagaauu

SEQ ID NO: 314 - RNA, 1889 nt, Artificial Sequence
  mRNA product Slc7a3_RAV-G(GC)_PSMB3_A64
gggagagggcgcuuggcuugcaaggacccugagcugcggcauugaagcacacccaacccaacucgacugaagucagccucacugaaccggaucugagaaucuucucucucugggcuugccagggcucuccgaaccuagcuagcauccucuucaauuccaacuagaaagcuuaccauggugccccaggcccuccuguucgucccgcugcugguguucccccucugcuucggcaaguuccccaucuacaccauccccgacaagcuggggccguggagccccaucgacauccaccaccuguccugccccaacaaccucguggucgaggacgagggcugcaccaaccugagcggguucuccuacauggagcugaaggugggcuacaucagcgccaucaagaugaacggguucacgugcaccggcguggucaccgaggcggagaccuacacgaacuucgugggcuacgugaccaccaccuucaagcggaagcacuuccgccccacgccggacgccugccgggccgccuacaacuggaagauggccggggacccccgcuacgaggagucccuccacaaccccuaccccgacuaccacuggcugcggaccgucaagaccaccaaggagagccuggugaucaucuccccgagcguggcggaccucgaccccuacgaccgcucccugcacagccgggucuuccccggcgggaacugcuccggcguggccgugagcuccacguacugcagcaccaaccacgacuacaccaucuggaugcccgagaacccgcgccuggggauguccugcgacaucuucaccaacagccggggcaagcgcgccuccaagggcagcgagacgugcggguucgucgacgagcggggccucuacaagucccugaagggggccugcaagcugaagcucugcggcgugcugggccugcgccucauggacgggaccuggguggcgaugcagaccagcaacgagaccaaguggugcccccccggccagcuggucaaccugcacgacuuccggagcgacgagaucgagcaccucgugguggaggagcuggucaagaagcgcgaggagugccuggacgcccucgaguccaucaugacgaccaagagcguguccuuccggcgccugagccaccuccggaagcuggugcccggguucggcaaggccuacaccaucuucaacaagacccugauggaggccgacgcccacuacaaguccguccgcacguggaacgagaucaucccgagcaaggggugccugcgggugggcggccgcugccacccccacgucaacgggguguucuucaacggcaucauccucgggcccgacggcaacgugcugauccccgagaugcaguccagccugcuccagcagcacauggagcugcuggucuccagcgugaucccgcucaugcacccccuggcggaccccuccaccguguucaagaacggggacgaggccgaggacuucgucgaggugcaccuccccgacgugcacgagcggaucagcggcgucgaccugggccugccgaacugggggaaguacgugcugcucuccgccggcgcccugaccgcccugaugcugaucaucuuccucaugaccugcuggcgccgggugaaccggagcgagcccacgcagcacaaccugcgcgggaccggccgggaggucuccgugaccccgcagagcgggaagaucaucuccagcugggaguccuacaagagcggcggcgagaccgggcugugaggacuagucccuguucccagagcccacuuuuuuuucuuuuuuugaaauaaaauagccugucuuucagaucuaaaaaaaaaaaaaaaaaaaaaaaaaaaaaaaaaaaaaaaaaaaaaaaaaaaaaaaaaaaaaaaagaauu

SEQ ID NO: 315 - RNA, 955 nt, Artificial Sequence
  mRNA product Slc7a3_HsEPO(GC)_PSMB3_A64-C30-histoneSL
gggagagggcgcuuggcuugcaaggacccugagcugcggcauugaagcacacccaacccaacucgacugaagucagccucacugaaccggaucugagaaucuucucucucugggcuugccagggcucuccgaaccuagcuagcauccucuucaauuccaacuagaaagcuuaccaugggcgugcacgagugccccgccuggcuguggcuccugcugagccuccugucccugccgcucgggcugcccguccugggcgcccccccgcggcucaucugcgacagccgcgugcuggagcgguaccugcucgaggcgaaggaggccgagaacaucaccaccgggugcgccgagcacugcucccugaacgagaacaucacggugccggacaccaaggucaacuucuacgccuggaagcgcauggaggugggccagcaggccguggaggucuggcaggggcuggcgcuccugagcgaggccgugcugcggggccaggcccuccuggugaacuccagccagcccugggagccccugcagcuccacgucgacaaggccguguccggccugcgcagccugaccacccuccugcgggcgcugggggcccagaaggaggccaucucccccccggacgccgccagcgcggccccgcuccgcacgaucaccgccgacaccuuccggaagcuguuccgcguguacuccaacuuccugcggggcaagcucaagcuguacaccggggaggccugccgcacgggcgaccggugaggacuagucccuguucccagagcccacuuuuuuuucuuuuuuugaaauaaaauagccugucuuucagaucuaaaaaaaaaaaaaaaaaaaaaaaaaaaaaaaaaaaaaaaaaaaaaaaaaaaaaaaaaaaaaaaaugcaucccccccccccccccccccccccccccccccaaaggcucuuuucagagccaccagaauu

SEQ ID NO: 316 - RNA, 896 nt, Artificial Sequence
  mRNA product Slc7a3_HsEPO(GC)_PSMB3_A64
gggagagggcgcuuggcuugcaaggacccugagcugcggcauugaagcacacccaacccaacucgacugaagucagccucacugaaccggaucugagaaucuucucucucugggcuugccagggcucuccgaaccuagcuagcauccucuucaauuccaacuagaaagcuuaccaugggcgugcacgagugccccgccuggcuguggcuccugcugagccuccugucccugccgcucgggcugcccguccugggcgcccccccgcggcucaucugcgacagccgcgugcuggagcgguaccugcucgaggcgaaggaggccgagaacaucaccaccgggugcgccgagcacugcucccugaacgagaacaucacggugccggacaccaaggucaacuucuacgccuggaagcgcauggaggugggccagcaggccguggaggucuggcaggggcuggcgcuccugagcgaggccgugcugcggggccaggcccuccuggugaacuccagccagcccugggagccccugcagcuccacgucgacaaggccguguccggccugcgcagccugaccacccuccugcgggcgcugggggcccagaaggaggccaucucccccccggacgccgccagcgcggccccgcuccgcacgaucaccgccgacaccuuccggaagcuguuccgcguguacuccaacuuccugcggggcaagcucaagcuguacaccggggaggccugccgcacgggcgaccggugaggacuagucccuguucccagagcccacuuuuuuuucuuuuuuugaaauaaaauagccugucuuucagaucuaaaaaaaaaaaaaaaaaaaaaaaaaaaaaaaaaaaaaaaaaaaaaaaaaaaaaaaaaaaaaaaagaauu

SEQ ID NO: 317 - RNA, 2026 nt, Artificial Sequence
  mRNA product Slc7a3_PpLuc(GC)_PSMB3_A64-C30-histoneSL
gggagagggcgcuuggcuugcaaggacccugagcugcggcauugaagcacacccaacccaacucgacugaagucagccucacugaaccggaucugagaaucuucucucucugggcuugccagggcucuccgaaccuagcuagcauccucuucaauuccaacuagaaagcuuaccauggaggacgccaagaacaucaagaagggcccggcgcccuucuacccgcuggaggacgggaccgccggcgagcagcuccacaaggccaugaagcgguacgcccuggugccgggcacgaucgccuucaccgacgcccacaucgaggucgacaucaccuacgcggaguacuucgagaugagcgugcgccuggccgaggccaugaagcgguacggccugaacaccaaccaccggaucguggugugcucggagaacagccugcaguucuucaugccggugcugggcgcccucuucaucggcguggccgucgccccggcgaacgacaucuacaacgagcgggagcugcugaacagcauggggaucagccagccgaccgugguguucgugagcaagaagggccugcagaagauccugaacgugcagaagaagcugcccaucauccagaagaucaucaucauggacagcaagaccgacuaccagggcuuccagucgauguacacguucgugaccagccaccucccgccgggcuucaacgaguacgacuucgucccggagagcuucgaccgggacaagaccaucgcccugaucaugaacagcagcggcagcaccggccugccgaaggggguggcccugccgcaccggaccgccugcgugcgcuucucgcacgcccgggaccccaucuucggcaaccagaucaucccggacaccgccauccugagcguggugccguuccaccacggcuucggcauguucacgacccugggcuaccucaucugcggcuuccgggugguccugauguaccgguucgaggaggagcuguuccugcggagccugcaggacuacaagauccagagcgcgcugcucgugccgacccuguucagcuucuucgccaagagcacccugaucgacaaguacgaccugucgaaccugcacgagaucgccagcgggggcgccccgcugagcaaggaggugggcgaggccguggccaagcgguuccaccucccgggcauccgccagggcuacggccugaccgagaccacgagcgcgauccugaucacccccgagggggacgacaagccgggcgccgugggcaagguggucccguucuucgaggccaaggugguggaccuggacaccggcaagacccugggcgugaaccagcggggcgagcugugcgugcgggggccgaugaucaugagcggcuacgugaacaacccggaggccaccaacgcccucaucgacaaggacggcuggcugcacagcggcgacaucgccuacugggacgaggacgagcacuucuucaucgucgaccggcugaagucgcugaucaaguacaagggcuaccagguggcgccggccgagcuggagagcauccugcuccagcaccccaacaucuucgacgccggcguggccgggcugccggacgacgacgccggcgagcugccggccgcggugguggugcuggagcacggcaagaccaugacggagaaggagaucgucgacuacguggccagccaggugaccaccgccaagaagcugcggggcggcgugguguucguggacgaggucccgaagggccugaccgggaagcucgacgcccggaagauccgcgagauccugaucaaggccaagaagggcggcaagaucgccgugugaggacuagucccuguucccagagcccacuuuuuuuucuuuuuuugaaauaaaauagccugucuuucagaucuaaaaaaaaaaaaaaaaaaaaaaaaaaaaaaaaaaaaaaaaaaaaaaaaaaaaaaaaaaaaaaaaugcaucccccccccccccccccccccccccccccccaaaggcucuuuucagagccaccagaauu

SEQ ID NO: 318 - RNA, 1967 nt, Artificial Sequence
  mRNA product Slc7a3_PpLuc(GC)_PSMB3_A64
gggagagggcgcuuggcuugcaaggacccugagcugcggcauugaagcacacccaacccaacucgacugaagucagccucacugaaccggaucugagaaucuucucucucugggcuugccagggcucuccgaaccuagcuagcauccucuucaauuccaacuagaaagcuuaccauggaggacgccaagaacaucaagaagggcccggcgcccuucuacccgcuggaggacgggaccgccggcgagcagcuccacaaggccaugaagcgguacgcccuggugccgggcacgaucgccuucaccgacgcccacaucgaggucgacaucaccuacgcggaguacuucgagaugagcgugcgccuggccgaggccaugaagcgguacggccugaacaccaaccaccggaucguggugugcucggagaacagccugcaguucuucaugccggugcugggcgcccucuucaucggcguggccgucgccccggcgaacgacaucuacaacgagcgggagcugcugaacagcauggggaucagccagccgaccgugguguucgugagcaagaagggccugcagaagauccugaacgugcagaagaagcugcccaucauccagaagaucaucaucauggacagcaagaccgacuaccagggcuuccagucgauguacacguucgugaccagccaccucccgccgggcuucaacgaguacgacuucgucccggagagcuucgaccgggacaagaccaucgcccugaucaugaacagcagcggcagcaccggccugccgaaggggguggcccugccgcaccggaccgccugcgugcgcuucucgcacgcccgggaccccaucuucggcaaccagaucaucccggacaccgccauccugagcguggugccguuccaccacggcuucggcauguucacgacccugggcuaccucaucugcggcuuccgggugguccugauguaccgguucgaggaggagcuguuccugcggagccugcaggacuacaagauccagagcgcgcugcucgugccgacccuguucagcuucuucgccaagagcacccugaucgacaaguacgaccugucgaaccugcacgagaucgccagcgggggcgccccgcugagcaaggaggugggcgaggccguggccaagcgguuccaccucccgggcauccgccagggcuacggccugaccgagaccacgagcgcgauccugaucacccccgagggggacgacaagccgggcgccgugggcaagguggucccguucuucgaggccaaggugguggaccuggacaccggcaagacccugggcgugaaccagcggggcgagcugugcgugcgggggccgaugaucaugagcggcuacgugaacaacccggaggccaccaacgcccucaucgacaaggacggcuggcugcacagcggcgacaucgccuacugggacgaggacgagcacuucuucaucgucgaccggcugaagucgcugaucaaguacaagggcuaccagguggcgccggccgagcuggagagcauccugcuccagcaccccaacaucuucgacgccggcguggccgggcugccggacgacgacgccggcgagcugccggccgcggugguggugcuggagcacggcaagaccaugacggagaaggagaucgucgacuacguggccagccaggugaccaccgccaagaagcugcggggcggcgugguguucguggacgaggucccgaagggccugaccgggaagcucgacgcccggaagauccgcgagauccugaucaaggccaagaagggcggcaagaucgccgugugaggacuagucccuguucccagagcccacuuuuuuuucuuuuuuugaaauaaaauagccugucuuucagaucuaaaaaaaaaaaaaaaaaaaaaaaaaaaaaaaaaaaaaaaaaaaaaaaaaaaaaaaaaaaaaaaagaauu

SEQ ID NO: 319 - RNA, 2035 nt, Artificial Sequence
  mRNA product Slc7a3_protein of interest example 5_PSMB3_A64-C30-histoneSL
  misc_feature (175)..(1836): n is a, c, g, or u
gggagagggcgcuuggcuugcaaggacccugagcugcggcauugaagcacacccaacccaacucgacugaagucagccucacugaaccggaucugagaaucuucucucucugggcuugccagggcucuccgaaccuagcuagcauccucuucaauuccaacuagaaagcuuaccnnnnnnnnnnnnnnnnnnnnnnnnnnnnnnnnnnnnnnnnnnnnnnnnnnnnnnnnnnnnnnnnnnnnnnnnnnnnnnnnnnnnnnnnnnnnnnnnnnnnnnnnnnnnnnnnnnnnnnnnnnnnnnnnnnnnnnnnnnnnnnnnnnnnnnnnnnnnnnnnnnnnnnnnnnnnnnnnnnnnnnnnnnnnnnnnnnnnnnnnnnnnnnnnnnnnnnnnnnnnnnnnnnnnnnnnnnnnnnnnnnnnnnnnnnnnnnnnnnnnnnnnnnnnnnnnnnnnnnnnnnnnnnnnnnnnnnnnnnnnnnnnnnnnnnnnnnnnnnnnnnnnnnnnnnnnnnnnnnnnnnnnnnnnnnnnnnnnnnnnnnnnnnnnnnnnnnnnnnnnnnnnnnnnnnnnnnnnnnnnnnnnnnnnnnnnnnnnnnnnnnnnnnnnnnnnnnnnnnnnnnnnnnnnnnnnnnnnnnnnnnnnnnnnnnnnnnnnnnnnnnnnnnnnnnnnnnnnnnnnnnnnnnnnnnnnnnnnnnnnnnnnnnnnnnnnnnnnnnnnnnnnnnnnnnnnnnnnnnnnnnnnnnnnnnnnnnnnnnnnnnnnnnnnnnnnnnnnnnnnnnnnnnnnnnnnnnnnnnnnnnnnnnnnnnnnnnnnnnnnnnnnnnnnnnnnnnnnnnnnnnnnnnnnnnnnnnnnnnnnnnnnnnnnnnnnnnnnnnnnnnnnnnnnnnnnnnnnnnnnnnnnnnnnnnnnnnnnnnnnnnnnnnnnnnnnnnnnnnnnnnnnnnnnnnnnnnnnnnnnnnnnnnnnnnnnnnnnnnnnnnnnnnnnnnnnnnnnnnnnnnnnnnnnnnnnnnnnnnnnnnnnnnnnnnnnnnnnnnnnnnnnnnnnnnnnnnnnnnnnnnnnnnnnnnnnnnnnnnnnnnnnnnnnnnnnnnnnnnnnnnnnnnnnnnnnnnnnnnnnnnnnnnnnnnnnnnnnnnnnnnnnnnnnnnnnnnnnnnnnnnnnnnnnnnnnnnnnnnnnnnnnnnnnnnnnnnnnnnnnnnnnnnnnnnnnnnnnnnnnnnnnnnnnnnnnnnnnnnnnnnnnnnnnnnnnnnnnnnnnnnnnnnnnnnnnnnnnnnnnnnnnnnnnnnnnnnnnnnnnnnnnnnnnnnnnnnnnnnnnnnnnnnnnnnnnnnnnnnnnnnnnnnnnnnnnnnnnnnnnnnnnnnnnnnnnnnnnnnnnnnnnnnnnnnnnnnnnnnnnnnnnnnnnnnnnnnnnnnnnnnnnnnnnnnnnnnnnnnnnnnnnnnnnnnnnnnnnnnnnnnnnnnnnnnnnnnnnnnnnnnnnnnnnnnnnnnnnnnnnnnnnnnnnnnnnnnnnnnnnnnnnnnnnnnnnnnnnnnnnnnnnnnnnnnnnnnnnnnnnnnnnnnnnnnnnnnnnnnnnnnnnnnnnnnnnnnnnnnnnnnnnnnnnnnnnnnnnnnnnnnnnnnnnnnnnnnnnnnnnnnnnnnnnnnnnnnnnnnnnnnnnnnnnnnnnnnnnnnnnnnnnnnnnnnnnnnnnnnnnnnnnnnnnnnnnnnnnnnnnnnnnnnnnnnnnnnnnnnnnnnnnnnnnnnnnnnnnnnnnnnnnnnnnnnnnnnnnnnnnnnnnnnnnnnnnnnnnnnnnnnnnnnnnnnnnnnnnnnnnnnnnnnnnnnnnnnnnnnnnnnggacuagucccuguucccagagcccacuuuuuuuucuuuuuuugaaauaaaauagccugucuuucagaucuaaaaaaaaaaaaaaaaaaaaaaaaaaaaaaaaaaaaaaaaaaaaaaaaaaaaaaaaaaaaaaaaugcaucccccccccccccccccccccccccccccccaaaggcucuuuucagagccaccagaauu

SEQ ID NO: 320 - RNA, 2012 nt, Artificial Sequence
  mRNA product Slc7a3_RAV-G(GC)_CASP1_A64-C30-histoneSL
gggagagggcgcuuggcuugcaaggacccugagcugcggcauugaagcacacccaacccaacucgacugaagucagccucacugaaccggaucugagaaucuucucucucugggcuugccagggcucuccgaaccuagcuagcauccucuucaauuccaacuagaaagcuuaccauggugccccaggcccuccuguucgucccgcugcugguguucccccucugcuucggcaaguuccccaucuacaccauccccgacaagcuggggccguggagccccaucgacauccaccaccuguccugccccaacaaccucguggucgaggacgagggcugcaccaaccugagcggguucuccuacauggagcugaaggugggcuacaucagcgccaucaagaugaacggguucacgugcaccggcguggucaccgaggcggagaccuacacgaacuucgugggcuacgugaccaccaccuucaagcggaagcacuuccgccccacgccggacgccugccgggccgccuacaacuggaagauggccggggacccccgcuacgaggagucccuccacaaccccuaccccgacuaccacuggcugcggaccgucaagaccaccaaggagagccuggugaucaucuccccgagcguggcggaccucgaccccuacgaccgcucccugcacagccgggucuuccccggcgggaacugcuccggcguggccgugagcuccacguacugcagcaccaaccacgacuacaccaucuggaugcccgagaacccgcgccuggggauguccugcgacaucuucaccaacagccggggcaagcgcgccuccaagggcagcgagacgugcggguucgucgacgagcggggccucuacaagucccugaagggggccugcaagcugaagcucugcggcgugcugggccugcgccucauggacgggaccuggguggcgaugcagaccagcaacgagaccaaguggugcccccccggccagcuggucaaccugcacgacuuccggagcgacgagaucgagcaccucgugguggaggagcuggucaagaagcgcgaggagugccuggacgcccucgaguccaucaugacgaccaagagcguguccuuccggcgccugagccaccuccggaagcuggugcccggguucggcaaggccuacaccaucuucaacaagacccugauggaggccgacgcccacuacaaguccguccgcacguggaacgagaucaucccgagcaaggggugccugcgggugggcggccgcugccacccccacgucaacgggguguucuucaacggcaucauccucgggcccgacggcaacgugcugauccccgagaugcaguccagccugcuccagcagcacauggagcugcuggucuccagcgugaucccgcucaugcacccccuggcggaccccuccaccguguucaagaacggggacgaggccgaggacuucgucgaggugcaccuccccgacgugcacgagcggaucagcggcgucgaccugggccugccgaacugggggaaguacgugcugcucuccgccggcgcccugaccgcccugaugcugaucaucuuccucaugaccugcuggcgccgggugaaccggagcgagcccacgcagcacaaccugcgcgggaccggccgggaggucuccgugaccccgcagagcgggaagaucaucuccagcugggaguccuacaagagcggcggcgagaccgggcugugaggacuaguaauaaggaaacuguaugaaugucugugggcaggaagugaagagauccuucuguaaagguuuuuggaauuaugucugcugaauaauaaacuuuuuugaaauaauaaaucugguagaaaaaugagaucuaaaaaaaaaaaaaaaaaaaaaaaaaaaaaaaaaaaaaaaaaaaaaaaaaaaaaaaaaaaaaaaaugcaucccccccccccccccccccccccccccccccaaaggcucuuuucagagccaccagaauu

SEQ ID NO: 321 - RNA, 1953 nt, Artificial Sequence
  mRNA product Slc7a3_RAV-G(GC)_CASP1_A64
gggagagggcgcuuggcuugcaaggacccugagcugcggcauugaagcacacccaacccaacucgacugaagucagccucacugaaccggaucugagaaucuucucucucugggcuugccagggcucuccgaaccuagcuagcauccucuucaauuccaacuagaaagcuuaccauggugccccaggcccuccuguucgucccgcugcugguguucccccucugcuucggcaaguuccccaucuacaccauccccgacaagcuggggccguggagccccaucgacauccaccaccuguccugccccaacaaccucguggucgaggacgagggcugcaccaaccugagcggguucuccuacauggagcugaaggugggcuacaucagcgccaucaagaugaacggguucacgugcaccggcguggucaccgaggcggagaccuacacgaacuucgugggcuacgugaccaccaccuucaagcggaagcacuuccgccccacgccggacgccugccgggccgccuacaacuggaagauggccggggacccccgcuacgaggagucccuccacaaccccuaccccgacuaccacuggcugcggaccgucaagaccaccaaggagagccuggugaucaucuccccgagcguggcggaccucgaccccuacgaccgcucccugcacagccgggucuuccccggcgggaacugcuccggcguggccgugagcuccacguacugcagcaccaaccacgacuacaccaucuggaugcccgagaacccgcgccuggggauguccugcgacaucuucaccaacagccggggcaagcgcgccuccaagggcagcgagacgugcggguucgucgacgagcggggccucuacaagucccugaagggggccugcaagcugaagcucugcggcgugcugggccugcgccucauggacgggaccuggguggcgaugcagaccagcaacgagaccaaguggugcccccccggccagcuggucaaccugcacgacuuccggagcgacgagaucgagcaccucgugguggaggagcuggucaagaagcgcgaggagugccuggacgcccucgaguccaucaugacgaccaagagcguguccuuccggcgccugagccaccuccggaagcuggugcccggguucggcaaggccuacaccaucuucaacaagacccugauggaggccgacgcccacuacaaguccguccgcacguggaacgagaucaucccgagcaaggggugccugcgggugggcggccgcugccacccccacgucaacgggguguucuucaacggcaucauccucgggcccgacggcaacgugcugauccccgagaugcaguccagccugcuccagcagcacauggagcugcuggucuccagcgugaucccgcucaugcacccccuggcggaccccuccaccguguucaagaacggggacgaggccgaggacuucgucgaggugcaccuccccgacgugcacgagcggaucagcggcgucgaccugggccugccgaacugggggaaguacgugcugcucuccgccggcgcccugaccgcccugaugcugaucaucuuccucaugaccugcuggcgccgggugaaccggagcgagcccacgcagcacaaccugcgcgggaccggccgggaggucuccgugaccccgcagagcgggaagaucaucuccagcugggaguccuacaagagcggcggcgagaccgggcugugaggacuaguaauaaggaaacuguaugaaugucugugggcaggaagugaagagauccuucuguaaagguuuuuggaauuaugucugcugaauaauaaacuuuuuugaaauaauaaaucugguagaaaaaugagaucuaaaaaaaaaaaaaaaaaaaaaaaaaaaaaaaaaaaaaaaaaaaaaaaaaaaaaaaaaaaaaaaagaauu

SEQ ID NO: 322 - RNA, 1019 nt, Artificial Sequence
  mRNA product Slc7a3_HsEPO(GC)_CASP1_A64-C30-histoneSL
gggagagggcgcuuggcuugcaaggacccugagcugcggcauugaagcacacccaacccaacucgacugaagucagccucacugaaccggaucugagaaucuucucucucugggcuugccagggcucuccgaaccuagcuagcauccucuucaauuccaacuagaaagcuuaccaugggcgugcacgagugccccgccuggcuguggcuccugcugagccuccugucccugccgcucgggcugcccguccugggcgcccccccgcggcucaucugcgacagccgcgugcuggagcgguaccugcucgaggcgaaggaggccgagaacaucaccaccgggugcgccgagcacugcucccugaacgagaacaucacggugccggacaccaaggucaacuucuacgccuggaagcgcauggaggugggccagcaggccguggaggucuggcaggggcuggcgcuccugagcgaggccgugcugcggggccaggcccuccuggugaacuccagccagcccugggagccccugcagcuccacgucgacaaggccguguccggccugcgcagccugaccacccuccugcgggcgcugggggcccagaaggaggccaucucccccccggacgccgccagcgcggccccgcuccgcacgaucaccgccgacaccuuccggaagcuguuccgcguguacuccaacuuccugcggggcaagcucaagcuguacaccggggaggccugccgcacgggcgaccggugaggacuaguaauaaggaaacuguaugaaugucugugggcaggaagugaagagauccuucuguaaagguuuuuggaauuaugucugcugaauaauaaacuuuuuugaaauaauaaaucugguagaaaaaugagaucuaaaaaaaaaaaaaaaaaaaaaaaaaaaaaaaaaaaaaaaaaaaaaaaaaaaaaaaaaaaaaaaaugcaucccccccccccccccccccccccccccccccaaaggcucuuuucagagccaccagaauu

SEQ ID NO: 323 - RNA, 960 nt, Artificial Sequence
  mRNA product Slc7a3_HsEPO(GC)_CASP1_A64
gggagagggcgcuuggcuugcaaggacccugagcugcggcauugaagcacacccaacccaacucgacugaagucagccucacugaaccggaucugagaaucuucucucucugggcuugccagggcucuccgaaccuagcuagcauccucuucaauuccaacuagaaagcuuaccaugggcgugcacgagugccccgccuggcuguggcuccugcugagccuccugucccugccgcucgggcugcccguccugggcgcccccccgcggcucaucugcgacagccgcgugcuggagcgguaccugcucgaggcgaaggaggccgagaacaucaccaccgggugcgccgagcacugcucccugaacgagaacaucacggugccggacaccaaggucaacuucuacgccuggaagcgcauggaggugggccagcaggccguggaggucuggcaggggcuggcgcuccugagcgaggccgugcugcggggccaggcccuccuggugaacuccagccagcccugggagccccugcagcuccacgucgacaaggccguguccggccugcgcagccugaccacccuccugcgggcgcugggggcccagaaggaggccaucucccccccggacgccgccagcgcggccccgcuccgcacgaucaccgccgacaccuuccggaagcuguuccgcguguacuccaacuuccugcggggcaagcucaagcuguacaccggggaggccugccgcacgggcgaccggugaggacuaguaauaaggaaacuguaugaaugucugugggcaggaagugaagagauccuucuguaaagguuuuuggaauuaugucugcugaauaauaaacuuuuuugaaauaauaaaucugguagaaaaaugagaucuaaaaaaaaaaaaaaaaaaaaaaaaaaaaaaaaaaaaaaaaaaaaaaaaaaaaaaaaaaaaaaaagaauu

SEQ ID NO: 324 - RNA, 2090 nt, Artificial Sequence
  mRNA product Slc7a3_PpLuc(GC)_CASP1_A64-C30-histoneSL
gggagagggcgcuuggcuugcaaggacccugagcugcggcauugaagcacacccaacccaacucgacugaagucagccucacugaaccggaucugagaaucuucucucucugggcuugccagggcucuccgaaccuagcuagcauccucuucaauuccaacuagaaagcuuaccauggaggacgccaagaacaucaagaagggcccggcgcccuucuacccgcuggaggacgggaccgccggcgagcagcuccacaaggccaugaagcgguacgcccuggugccgggcacgaucgccuucaccgacgcccacaucgaggucgacaucaccuacgcggaguacuucgagaugagcgugcgccuggccgaggccaugaagcgguacggccugaacaccaaccaccggaucguggugugcucggagaacagccugcaguucuucaugccggugcugggcgcccucuucaucggcguggccgucgccccggcgaacgacaucuacaacgagcgggagcugcugaacagcauggggaucagccagccgaccgugguguucgugagcaagaagggccugcagaagauccugaacgugcagaagaagcugcccaucauccagaagaucaucaucauggacagcaagaccgacuaccagggcuuccagucgauguacacguucgugaccagccaccucccgccgggcuucaacgaguacgacuucgucccggagagcuucgaccgggacaagaccaucgcccugaucaugaacagcagcggcagcaccggccugccgaaggggguggcccugccgcaccggaccgccugcgugcgcuucucgcacgcccgggaccccaucuucggcaaccagaucaucccggacaccgccauccugagcguggugccguuccaccacggcuucggcauguucacgacccugggcuaccucaucugcggcuuccgggugguccugauguaccgguucgaggaggagcuguuccugcggagccugcaggacuacaagauccagagcgcgcugcucgugccgacccuguucagcuucuucgccaagagcacccugaucgacaaguacgaccugucgaaccugcacgagaucgccagcgggggcgccccgcugagcaaggaggugggcgaggccguggccaagcgguuccaccucccgggcauccgccagggcuacggccugaccgagaccacgagcgcgauccugaucacccccgagggggacgacaagccgggcgccgugggcaagguggucccguucuucgaggccaaggugguggaccuggacaccggcaagacccugggcgugaaccagcggggcgagcugugcgugcgggggccgaugaucaugagcggcuacgugaacaacccggaggccaccaacgcccucaucgacaaggacggcuggcugcacagcggcgacaucgccuacugggacgaggacgagcacuucuucaucgucgaccggcugaagucgcugaucaaguacaagggcuaccagguggcgccggccgagcuggagagcauccugcuccagcaccccaacaucuucgacgccggcguggccgggcugccggacgacgacgccggcgagcugccggccgcggugguggugcuggagcacggcaagaccaugacggagaaggagaucgucgacuacguggccagccaggugaccaccgccaagaagcugcggggcggcgugguguucguggacgaggucccgaagggccugaccgggaagcucgacgcccggaagauccgcgagauccugaucaaggccaagaagggcggcaagaucgccgugugaggacuaguaauaaggaaacuguaugaaugucugugggcaggaagugaagagauccuucuguaaagguuuuuggaauuaugucugcugaauaauaaacuuuuuugaaauaauaaaucugguagaaaaaugagaucuaaaaaaaaaaaaaaaaaaaaaaaaaaaaaaaaaaaaaaaaaaaaaaaaaaaaaaaaaaaaaaaaugcaucccccccccccccccccccccccccccccccaaaggcucuuuucagagccaccagaauu

SEQ ID NO: 325 - RNA, 2031 nt, Artificial Sequence
  mRNA product Slc7a3_PpLuc(GC)_CASP1_A64
gggagagggcgcuuggcuugcaaggacccugagcugcggcauugaagcacacccaacccaacucgacugaagucagccucacugaaccggaucugagaaucuucucucucugggcuugccagggcucuccgaaccuagcuagcauccucuucaauuccaacuagaaagcuuaccauggaggacgccaagaacaucaagaagggcccggcgcccuucuacccgcuggaggacgggaccgccggcgagcagcuccacaaggccaugaagcgguacgcccuggugccgggcacgaucgccuucaccgacgcccacaucgaggucgacaucaccuacgcggaguacuucgagaugagcgugcgccuggccgaggccaugaagcgguacggccugaacaccaaccaccggaucguggugugcucggagaacagccugcaguucuucaugccggugcugggcgcccucuucaucggcguggccgucgccccggcgaacgacaucuacaacgagcgggagcugcugaacagcauggggaucagccagccgaccgugguguucgugagcaagaagggccugcagaagauccugaacgugcagaagaagcugcccaucauccagaagaucaucaucauggacagcaagaccgacuaccagggcuuccagucgauguacacguucgugaccagccaccucccgccgggcuucaacgaguacgacuucgucccggagagcuucgaccgggacaagaccaucgcccugaucaugaacagcagcggcagcaccggccugccgaaggggguggcccugccgcaccggaccgccugcgugcgcuucucgcacgcccgggaccccaucuucggcaaccagaucaucccggacaccgccauccugagcguggugccguuccaccacggcuucggcauguucacgacccugggcuaccucaucugcggcuuccgggugguccugauguaccgguucgaggaggagcuguuccugcggagccugcaggacuacaagauccagagcgcgcugcucgugccgacccuguucagcuucuucgccaagagcacccugaucgacaaguacgaccugucgaaccugcacgagaucgccagcgggggcgccccgcugagcaaggaggugggcgaggccguggccaagcgguuccaccucccgggcauccgccagggcuacggccugaccgagaccacgagcgcgauccugaucacccccgagggggacgacaagccgggcgccgugggcaagguggucccguucuucgaggccaaggugguggaccuggacaccggcaagacccugggcgugaaccagcggggcgagcugugcgugcgggggccgaugaucaugagcggcuacgugaacaacccggaggccaccaacgcccucaucgacaaggacggcuggcugcacagcggcgacaucgccuacugggacgaggacgagcacuucuucaucgucgaccggcugaagucgcugaucaaguacaagggcuaccagguggcgccggccgagcuggagagcauccugcuccagcaccccaacaucuucgacgccggcguggccgggcugccggacgacgacgccggcgagcugccggccgcggugguggugcuggagcacggcaagaccaugacggagaaggagaucgucgacuacguggccagccaggugaccaccgccaagaagcugcggggcggcgugguguucguggacgaggucccgaagggccugaccgggaagcucgacgcccggaagauccgcgagauccugaucaaggccaagaagggcggcaagaucgccgugugaggacuaguaauaaggaaacuguaugaaugucugugggcaggaagugaagagauccuucuguaaagguuuuuggaauuaugucugcugaauaauaaacuuuuuugaaauaauaaaucugguagaaaaaugagaucuaaaaaaaaaaaaaaaaaaaaaaaaaaaaaaaaaaaaaaaaaaaaaaaaaaaaaaaaaaaaaaaagaauu

SEQ ID NO: 326 - RNA, 2099 nt, Artificial Sequence
  mRNA product Slc7a3_protein of interest example 5_CASP1_A64-C30-histoneSL
  misc_feature (175)..(1836): n is a, c, g, or u
gggagagggcgcuuggcuugcaaggacccugagcugcggcauugaagcacacccaacccaacucgacugaagucagccucacugaaccggaucugagaaucuucucucucugggcuugccagggcucuccgaaccuagcuagcauccucuucaauuccaacuagaaagcuuaccnnnnnnnnnnnnnnnnnnnnnnnnnnnnnnnnnnnnnnnnnnnnnnnnnnnnnnnnnnnnnnnnnnnnnnnnnnnnnnnnnnnnnnnnnnnnnnnnnnnnnnnnnnnnnnnnnnnnnnnnnnnnnnnnnnnnnnnnnnnnnnnnnnnnnnnnnnnnnnnnnnnnnnnnnnnnnnnnnnnnnnnnnnnnnnnnnnnnnnnnnnnnnnnnnnnnnnnnnnnnnnnnnnnnnnnnnnnnnnnnnnnnnnnnnnnnnnnnnnnnnnnnnnnnnnnnnnnnnnnnnnnnnnnnnnnnnnnnnnnnnnnnnnnnnnnnnnnnnnnnnnnnnnnnnnnnnnnnnnnnnnnnnnnnnnnnnnnnnnnnnnnnnnnnnnnnnnnnnnnnnnnnnnnnnnnnnnnnnnnnnnnnnnnnnnnnnnnnnnnnnnnnnnnnnnnnnnnnnnnnnnnnnnnnnnnnnnnnnnnnnnnnnnnnnnnnnnnnnnnnnnnnnnnnnnnnnnnnnnnnnnnnnnnnnnnnnnnnnnnnnnnnnnnnnnnnnnnnnnnnnnnnnnnnnnnnnnnnnnnnnnnnnnnnnnnnnnnnnnnnnnnnnnnnnnnnnnnnnnnnnnnnnnnnnnnnnnnnnnnnnnnnnnnnnnnnnnnnnnnnnnnnnnnnnnnnnnnnnnnnnnnnnnnnnnnnnnnnnnnnnnnnnnnnnnnnnnnnnnnnnnnnnnnnnnnnnnnnnnnnnnnnnnnnnnnnnnnnnnnnnnnnnnnnnnnnnnnnnnnnnnnnnnnnnnnnnnnnnnnnnnnnnnnnnnnnnnnnnnnnnnnnnnnnnnnnnnnnnnnnnnnnnnnnnnnnnnnnnnnnnnnnnnnnnnnnnnnnnnnnnnnnnnnnnnnnnnnnnnnnnnnnnnnnnnnnnnnnnnnnnnnnnnnnnnnnnnnnnnnnnnnnnnnnnnnnnnnnnnnnnnnnnnnnnnnnnnnnnnnnnnnnnnnnnnnnnnnnnnnnnnnnnnnnnnnnnnnnnnnnnnnnnnnnnnnnnnnnnnnnnnnnnnnnnnnnnnnnnnnnnnnnnnnnnnnnnnnnnnnnnnnnnnnnnnnnnnnnnnnnnnnnnnnnnnnnnnnnnnnnnnnnnnnnnnnnnnnnnnnnnnnnnnnnnnnnnnnnnnnnnnnnnnnnnnnnnnnnnnnnnnnnnnnnnnnnnnnnnnnnnnnnnnnnnnnnnnnnnnnnnnnnnnnnnnnnnnnnnnnnnnnnnnnnnnnnnnnnnnnnnnnnnnnnnnnnnnnnnnnnnnnnnnnnnnnnnnnnnnnnnnnnnnnnnnnnnnnnnnnnnnnnnnnnnnnnnnnnnnnnnnnnnnnnnnnnnnnnnnnnnnnnnnnnnnnnnnnnnnnnnnnnnnnnnnnnnnnnnnnnnnnnnnnnnnnnnnnnnnnnnnnnnnnnnnnnnnnnnnnnnnnnnnnnnnnnnnnnnnnnnnnnnnnnnnnnnnnnnnnnnnnnnnnnnnnnnnnnnnnnnnnnnnnnnnnnnnnnnnnnnnnnnnnnnnnnnnnnnnnnnnnnnnnnnnnnnnnnnnnnnnnnnnnnnnnnnnnnnnnnnnnnnnnnnnnnnnnnnnnnnnnnnnnnnnnnnnnnnnnnnnnnnnnnnnnnnnnnnnnnnnnnnnnnnnnnnnnnnnnnnnnnnnnnnnnnnnnnnnnnnnggacuaguaauaaggaaacuguaugaaugucugugggcaggaagugaagagauccuucuguaaagguuuuuggaauuaugucugcugaauaauaaacuuuuuugaaauaauaaaucugguagaaaaaugagaucuaaaaaaaaaaaaaaaaaaaaaaaaaaaaaaaaaaaaaaaaaaaaaaaaaaaaaaaaaaaaaaaaugcaucccccccccccccccccccccccccccccccaaaggcucuuuucagagccaccagaauu

SEQ ID NO: 327 - RNA, 2028 nt, Artificial Sequence
  mRNA product Slc7a3_RAV-G(GC)_COX6B1_A64-C30-histoneSL
gggagagggcgcuuggcuugcaaggacccugagcugcggcauugaagcacacccaacccaacucgacugaagucagccucacugaaccggaucugagaaucuucucucucugggcuugccagggcucuccgaaccuagcuagcauccucuucaauuccaacuagaaagcuuaccauggugccccaggcccuccuguucgucccgcugcugguguucccccucugcuucggcaaguuccccaucuacaccauccccgacaagcuggggccguggagccccaucgacauccaccaccuguccugccccaacaaccucguggucgaggacgagggcugcaccaaccugagcggguucuccuacauggagcugaaggugggcuacaucagcgccaucaagaugaacggguucacgugcaccggcguggucaccgaggcggagaccuacacgaacuucgugggcuacgugaccaccaccuucaagcggaagcacuuccgccccacgccggacgccugccgggccgccuacaacuggaagauggccggggacccccgcuacgaggagucccuccacaaccccuaccccgacuaccacuggcugcggaccgucaagaccaccaaggagagccuggugaucaucuccccgagcguggcggaccucgaccccuacgaccgcucccugcacagccgggucuuccccggcgggaacugcuccggcguggccgugagcuccacguacugcagcaccaaccacgacuacaccaucuggaugcccgagaacccgcgccuggggauguccugcgacaucuucaccaacagccggggcaagcgcgccuccaagggcagcgagacgugcggguucgucgacgagcggggccucuacaagucccugaagggggccugcaagcugaagcucugcggcgugcugggccugcgccucauggacgggaccuggguggcgaugcagaccagcaacgagaccaaguggugcccccccggccagcuggucaaccugcacgacuuccggagcgacgagaucgagcaccucgugguggaggagcuggucaagaagcgcgaggagugccuggacgcccucgaguccaucaugacgaccaagagcguguccuuccggcgccugagccaccuccggaagcuggugcccggguucggcaaggccuacaccaucuucaacaagacccugauggaggccgacgcccacuacaaguccguccgcacguggaacgagaucaucccgagcaaggggugccugcgggugggcggccgcugccacccccacgucaacgggguguucuucaacggcaucauccucgggcccgacggcaacgugcugauccccgagaugcaguccagccugcuccagcagcacauggagcugcuggucuccagcgugaucccgcucaugcacccccuggcggaccccuccaccguguucaagaacggggacgaggccgaggacuucgucgaggugcaccuccccgacgugcacgagcggaucagcggcgucgaccugggccugccgaacugggggaaguacgugcugcucuccgccggcgcccugaccgcccugaugcugaucaucuuccucaugaccugcuggcgccgggugaaccggagcgagcccacgcagcacaaccugcgcgggaccggccgggaggucuccgugaccccgcagagcgggaagaucaucuccagcugggaguccuacaagagcggcggcgagaccgggcugugaggacuaguacuggcugcaucucccuuuccucuguccuccauccuucucccaggauggugaagggggaccugguacccagugauccccaccccaggauccuaaaucaugacuuaccugcuaauaaaaacucauuggaaaagugagaagaucuaaaaaaaaaaaaaaaaaaaaaaaaaaaaaaaaaaaaaaaaaaaaaaaaaaaaaaaaaaaaaaaaugcaucccccccccccccccccccccccccccccccaaaggcucuuuucagagccaccagaauu

SEQ ID NO: 328 - RNA, 1969 nt, Artificial Sequence
  mRNA product Slc7a3_RAV-G(GC)_COX6B1_A64
gggagagggcgcuuggcuugcaaggacccugagcugcggcauugaagcacacccaacccaacucgacugaagucagccucacugaaccggaucugagaaucuucucucucugggcuugccagggcucuccgaaccuagcuagcauccucuucaauuccaacuagaaagcuuaccauggugccccaggcccuccuguucgucccgcugcugguguucccccucugcuucggcaaguuccccaucuacaccauccccgacaagcuggggccguggagccccaucgacauccaccaccuguccugccccaacaaccucguggucgaggacgagggcugcaccaaccugagcggguucuccuacauggagcugaaggugggcuacaucagcgccaucaagaugaacggguucacgugcaccggcguggucaccgaggcggagaccuacacgaacuucgugggcuacgugaccaccaccuucaagcggaagcacuuccgccccacgccggacgccugccgggccgccuacaacuggaagauggccggggacccccgcuacgaggagucccuccacaaccccuaccccgacuaccacuggcugcggaccgucaagaccaccaaggagagccuggugaucaucuccccgagcguggcggaccucgaccccuacgaccgcucccugcacagccgggucuuccccggcgggaacugcuccggcguggccgugagcuccacguacugcagcaccaaccacgacuacaccaucuggaugcccgagaacccgcgccuggggauguccugcgacaucuucaccaacagccggggcaagcgcgccuccaagggcagcgagacgugcggguucgucgacgagcggggccucuacaagucccugaagggggccugcaagcugaagcucugcggcgugcugggccugcgccucauggacgggaccuggguggcgaugcagaccagcaacgagaccaaguggugcccccccggccagcuggucaaccugcacgacuuccggagcgacgagaucgagcaccucgugguggaggagcuggucaagaagcgcgaggagugccuggacgcccucgaguccaucaugacgaccaagagcguguccuuccggcgccugagccaccuccggaagcuggugcccggguucggcaaggccuacaccaucuucaacaagacccugauggaggccgacgcccacuacaaguccguccgcacguggaacgagaucaucccgagcaaggggugccugcgggugggcggccgcugccacccccacgucaacgggguguucuucaacggcaucauccucgggcccgacggcaacgugcugauccccgagaugcaguccagccugcuccagcagcacauggagcugcuggucuccagcgugaucccgcucaugcacccccuggcggaccccuccaccguguucaagaacggggacgaggccgaggacuucgucgaggugcaccuccccgacgugcacgagcggaucagcggcgucgaccugggccugccgaacugggggaaguacgugcugcucuccgccggcgcccugaccgcccugaugcugaucaucuuccucaugaccugcuggcgccgggugaaccggagcgagcccacgcagcacaaccugcgcgggaccggccgggaggucuccgugaccccgcagagcgggaagaucaucuccagcugggaguccuacaagagcggcggcgagaccgggcugugaggacuaguacuggcugcaucucccuuuccucuguccuccauccuucucccaggauggugaagggggaccugguacccagugauccccaccccaggauccuaaaucaugacuuaccugcuaauaaaaacucauuggaaaagugagaagaucuaaaaaaaaaaaaaaaaaaaaaaaaaaaaaaaaaaaaaaaaaaaaaaaaaaaaaaaaaaaaaaaagaauu

SEQ ID NO: 329 - RNA, 1035 nt, Artificial Sequence
  mRNA product Slc7a3_HsEPO(GC)_COX6B1_A64-C30-histoneSL
gggagagggcgcuuggcuugcaaggacccugagcugcggcauugaagcacacccaacccaacucgacugaagucagccucacugaaccggaucugagaaucuucucucucugggcuugccagggcucuccgaaccuagcuagcauccucuucaauuccaacuagaaagcuuaccaugggcgugcacgagugccccgccuggcuguggcuccugcugagccuccugucccugccgcucgggcugcccguccugggcgcccccccgcggcucaucugcgacagccgcgugcuggagcgguaccugcucgaggcgaaggaggccgagaacaucaccaccgggugcgccgagcacugcucccugaacgagaacaucacggugccggacaccaaggucaacuucuacgccuggaagcgcauggaggugggccagcaggccguggaggucuggcaggggcuggcgcuccugagcgaggccgugcugcggggccaggcccuccuggugaacuccagccagcccugggagccccugcagcuccacgucgacaaggccguguccggccugcgcagccugaccacccuccugcgggcgcugggggcccagaaggaggccaucucccccccggacgccgccagcgcggccccgcuccgcacgaucaccgccgacaccuuccggaagcuguuccgcguguacuccaacuuccugcggggcaagcucaagcuguacaccggggaggccugccgcacgggcgaccggugaggacuaguacuggcugcaucucccuuuccucuguccuccauccuucucccaggauggugaagggggaccugguacccagugauccccaccccaggauccuaaaucaugacuuaccugcuaauaaaaacucauuggaaaagugagaagaucuaaaaaaaaaaaaaaaaaaaaaaaaaaaaaaaaaaaaaaaaaaaaaaaaaaaaaaaaaaaaaaaaugcaucccccccccccccccccccccccccccccccaaaggcucuuuucagagccaccagaauu

SEQ ID NO: 330 - RNA, 976 nt, Artificial Sequence
  mRNA product Slc7a3_HsEPO(GC)_COX6B1_A64
gggagagggcgcuuggcuugcaaggacccugagcugcggcauugaagcacacccaacccaacucgacugaagucagccucacugaaccggaucugagaaucuucucucucugggcuugccagggcucuccgaaccuagcuagcauccucuucaauuccaacuagaaagcuuaccaugggcgugcacgagugccccgccuggcuguggcuccugcugagccuccugucccugccgcucgggcugcccguccugggcgcccccccgcggcucaucugcgacagccgcgugcuggagcgguaccugcucgaggcgaaggaggccgagaacaucaccaccgggugcgccgagcacugcucccugaacgagaacaucacggugccggacaccaaggucaacuucuacgccuggaagcgcauggaggugggccagcaggccguggaggucuggcaggggcuggcgcuccugagcgaggccgugcugcggggccaggcccuccuggugaacuccagccagcccugggagccccugcagcuccacgucgacaaggccguguccggccugcgcagccugaccacccuccugcgggcgcugggggcccagaaggaggccaucucccccccggacgccgccagcgcggccccgcuccgcacgaucaccgccgacaccuuccggaagcuguuccgcguguacuccaacuuccugcggggcaagcucaagcuguacaccggggaggccugccgcacgggcgaccggugaggacuaguacuggcugcaucucccuuuccucuguccuccauccuucucccaggauggugaagggggaccugguacccagugauccccaccccaggauccuaaaucaugacuuaccugcuaauaaaaacucauuggaaaagugagaagaucuaaaaaaaaaaaaaaaaaaaaaaaaaaaaaaaaaaaaaaaaaaaaaaaaaaaaaaaaaaaaaaaagaauu

SEQ ID NO: 331 - RNA, 2106 nt, Artificial Sequence
  mRNA product Slc7a3_PpLuc(GC)_COX6B1_A64-C30-histoneSL
gggagagggcgcuuggcuugcaaggacccugagcugcggcauugaagcacacccaacccaacucgacugaagucagccucacugaaccggaucugagaaucuucucucucugggcuugccagggcucuccgaaccuagcuagcauccucuucaauuccaacuagaaagcuuaccauggaggacgccaagaacaucaagaagggcccggcgcccuucuacccgcuggaggacgggaccgccggcgagcagcuccacaaggccaugaagcgguacgcccuggugccgggcacgaucgccuucaccgacgcccacaucgaggucgacaucaccuacgcggaguacuucgagaugagcgugcgccuggccgaggccaugaagcgguacggccugaacaccaaccaccggaucguggugugcucggagaacagccugcaguucuucaugccggugcugggcgcccucuucaucggcguggccgucgccccggcgaacgacaucuacaacgagcgggagcugcugaacagcauggggaucagccagccgaccgugguguucgugagcaagaagggccugcagaagauccugaacgugcagaagaagcugcccaucauccagaagaucaucaucauggacagcaagaccgacuaccagggcuuccagucgauguacacguucgugaccagccaccucccgccgggcuucaacgaguacgacuucgucccggagagcuucgaccgggacaagaccaucgcccugaucaugaacagcagcggcagcaccggccugccgaaggggguggcccugccgcaccggaccgccugcgugcgcuucucgcacgcccgggaccccaucuucggcaaccagaucaucccggacaccgccauccugagcguggugccguuccaccacggcuucggcauguucacgacccugggcuaccucaucugcggcuuccgggugguccugauguaccgguucgaggaggagcuguuccugcggagccugcaggacuacaagauccagagcgcgcugcucgugccgacccuguucagcuucuucgccaagagcacccugaucgacaaguacgaccugucgaaccugcacgagaucgccagcgggggcgccccgcugagcaaggaggugggcgaggccguggccaagcgguuccaccucccgggcauccgccagggcuacggccugaccgagaccacgagcgcgauccugaucacccccgagggggacgacaagccgggcgccgugggcaagguggucccguucuucgaggccaaggugguggaccuggacaccggcaagacccugggcgugaaccagcggggcgagcugugcgugcgggggccgaugaucaugagcggcuacgugaacaacccggaggccaccaacgcccucaucgacaaggacggcuggcugcacagcggcgacaucgccuacugggacgaggacgagcacuucuucaucgucgaccggcugaagucgcugaucaaguacaagggcuaccagguggcgccggccgagcuggagagcauccugcuccagcaccccaacaucuucgacgccggcguggccgggcugccggacgacgacgccggcgagcugccggccgcggugguggugcuggagcacggcaagaccaugacggagaaggagaucgucgacuacguggccagccaggugaccaccgccaagaagcugcggggcggcgugguguucguggacgaggucccgaagggccugaccgggaagcucgacgcccggaagauccgcgagauccugaucaaggccaagaagggcggcaagaucgccgugugaggacuaguacuggcugcaucucccuuuccucuguccuccauccuucucccaggauggugaagggggaccugguacccagugauccccaccccaggauccuaaaucaugacuuaccugcuaauaaaaacucauuggaaaagugagaagaucuaaaaaaaaaaaaaaaaaaaaaaaaaaaaaaaaaaaaaaaaaaaaaaaaaaaaaaaaaaaaaaaaugcaucccccccccccccccccccccccccccccccaaaggcucuuuucagagccaccagaauu

SEQ ID NO: 332 - RNA, 2047 nt, Artificial Sequence
  mRNA product Slc7a3_PpLuc(GC)_COX6B1_A64
gggagagggcgcuuggcuugcaaggacccugagcugcggcauugaagcacacccaacccaacucgacugaagucagccucacugaaccggaucugagaaucuucucucucugggcuugccagggcucuccgaaccuagcuagcauccucuucaauuccaacuagaaagcuuaccauggaggacgccaagaacaucaagaagggcccggcgcccuucuacccgcuggaggacgggaccgccggcgagcagcuccacaaggccaugaagcgguacgcccuggugccgggcacgaucgccuucaccgacgcccacaucgaggucgacaucaccuacgcggaguacuucgagaugagcgugcgccuggccgaggccaugaagcgguacggccugaacaccaaccaccggaucguggugugcucggagaacagccugcaguucuucaugccggugcugggcgcccucuucaucggcguggccgucgccccggcgaacgacaucuacaacgagcgggagcugcugaacagcauggggaucagccagccgaccgugguguucgugagcaagaagggccugcagaagauccugaacgugcagaagaagcugcccaucauccagaagaucaucaucauggacagcaagaccgacuaccagggcuuccagucgauguacacguucgugaccagccaccucccgccgggcuucaacgaguacgacuucgucccggagagcuucgaccgggacaagaccaucgcccugaucaugaacagcagcggcagcaccggccugccgaaggggguggcccugccgcaccggaccgccugcgugcgcuucucgcacgcccgggaccccaucuucggcaaccagaucaucccggacaccgccauccugagcguggugccguuccaccacggcuucggcauguucacgacccugggcuaccucaucugcggcuuccgggugguccugauguaccgguucgaggaggagcuguuccugcggagccugcaggacuacaagauccagagcgcgcugcucgugccgacccuguucagcuucuucgccaagagcacccugaucgacaaguacgaccugucgaaccugcacgagaucgccagcgggggcgccccgcugagcaaggaggugggcgaggccguggccaagcgguuccaccucccgggcauccgccagggcuacggccugaccgagaccacgagcgcgauccugaucacccccgagggggacgacaagccgggcgccgugggcaagguggucccguucuucgaggccaaggugguggaccuggacaccggcaagacccugggcgugaaccagcggggcgagcugugcgugcgggggccgaugaucaugagcggcuacgugaacaacccggaggccaccaacgcccucaucgacaaggacggcuggcugcacagcggcgacaucgccuacugggacgaggacgagcacuucuucaucgucgaccggcugaagucgcugaucaaguacaagggcuaccagguggcgccggccgagcuggagagcauccugcuccagcaccccaacaucuucgacgccggcguggccgggcugccggacgacgacgccggcgagcugccggccgcggugguggugcuggagcacggcaagaccaugacggagaaggagaucgucgacuacguggccagccaggugaccaccgccaagaagcugcggggcggcgugguguucguggacgaggucccgaagggccugaccgggaagcucgacgcccggaagauccgcgagauccugaucaaggccaagaagggcggcaagaucgccgugugaggacuaguacuggcugcaucucccuuuccucuguccuccauccuucucccaggauggugaagggggaccugguacccagugauccccaccccaggauccuaaaucaugacuuaccugcuaauaaaaacucauuggaaaagugagaagaucuaaaaaaaaaaaaaaaaaaaaaaaaaaaaaaaaaaaaaaaaaaaaaaaaaaaaaaaaaaaaaaaagaauu

SEQ ID NO: 333 - RNA, 2115 nt, Artificial Sequence
  mRNA product Slc7a3_protein of interest example 5_COX6B1_A64-C30-histoneSL
  misc_feature (175)..(1836): n is a, c, g, or u
gggagagggcgcuuggcuugcaaggacccugagcugcggcauugaagcacacccaacccaacucgacugaagucagccucacugaaccggaucugagaaucuucucucucugggcuugccagggcucuccgaaccuagcuagcauccucuucaauuccaacuagaaagcuuaccnnnnnnnnnnnnnnnnnnnnnnnnnnnnnnnnnnnnnnnnnnnnnnnnnnnnnnnnnnnnnnnnnnnnnnnnnnnnnnnnnnnnnnnnnnnnnnnnnnnnnnnnnnnnnnnnnnnnnnnnnnnnnnnnnnnnnnnnnnnnnnnnnnnnnnnnnnnnnnnnnnnnnnnnnnnnnnnnnnnnnnnnnnnnnnnnnnnnnnnnnnnnnnnnnnnnnnnnnnnnnnnnnnnnnnnnnnnnnnnnnnnnnnnnnnnnnnnnnnnnnnnnnnnnnnnnnnnnnnnnnnnnnnnnnnnnnnnnnnnnnnnnnnnnnnnnnnnnnnnnnnnnnnnnnnnnnnnnnnnnnnnnnnnnnnnnnnnnnnnnnnnnnnnnnnnnnnnnnnnnnnnnnnnnnnnnnnnnnnnnnnnnnnnnnnnnnnnnnnnnnnnnnnnnnnnnnnnnnnnnnnnnnnnnnnnnnnnnnnnnnnnnnnnnnnnnnnnnnnnnnnnnnnnnnnnnnnnnnnnnnnnnnnnnnnnnnnnnnnnnnnnnnnnnnnnnnnnnnnnnnnnnnnnnnnnnnnnnnnnnnnnnnnnnnnnnnnnnnnnnnnnnnnnnnnnnnnnnnnnnnnnnnnnnnnnnnnnnnnnnnnnnnnnnnnnnnnnnnnnnnnnnnnnnnnnnnnnnnnnnnnnnnnnnnnnnnnnnnnnnnnnnnnnnnnnnnnnnnnnnnnnnnnnnnnnnnnnnnnnnnnnnnnnnnnnnnnnnnnnnnnnnnnnnnnnnnnnnnnnnnnnnnnnnnnnnnnnnnnnnnnnnnnnnnnnnnnnnnnnnnnnnnnnnnnnnnnnnnnnnnnnnnnnnnnnnnnnnnnnnnnnnnnnnnnnnnnnnnnnnnnnnnnnnnnnnnnnnnnnnnnnnnnnnnnnnnnnnnnnnnnnnnnnnnnnnnnnnnnnnnnnnnnnnnnnnnnnnnnnnnnnnnnnnnnnnnnnnnnnnnnnnnnnnnnnnnnnnnnnnnnnnnnnnnnnnnnnnnnnnnnnnnnnnnnnnnnnnnnnnnnnnnnnnnnnnnnnnnnnnnnnnnnnnnnnnnnnnnnnnnnnnnnnnnnnnnnnnnnnnnnnnnnnnnnnnnnnnnnnnnnnnnnnnnnnnnnnnnnnnnnnnnnnnnnnnnnnnnnnnnnnnnnnnnnnnnnnnnnnnnnnnnnnnnnnnnnnnnnnnnnnnnnnnnnnnnnnnnnnnnnnnnnnnnnnnnnnnnnnnnnnnnnnnnnnnnnnnnnnnnnnnnnnnnnnnnnnnnnnnnnnnnnnnnnnnnnnnnnnnnnnnnnnnnnnnnnnnnnnnnnnnnnnnnnnnnnnnnnnnnnnnnnnnnnnnnnnnnnnnnnnnnnnnnnnnnnnnnnnnnnnnnnnnnnnnnnnnnnnnnnnnnnnnnnnnnnnnnnnnnnnnnnnnnnnnnnnnnnnnnnnnnnnnnnnnnnnnnnnnnnnnnnnnnnnnnnnnnnnnnnnnnnnnnnnnnnnnnnnnnnnnnnnnnnnnnnnnnnnnnnnnnnnnnnnnnnnnnnnnnnnnnnnnnnnnnnnnnnnnnnnnnnnnnnnnnnnnnnnnnnnnnnnnnnnnnnnnnnnnnnnnnnnnnnnnnnnnnnnnnnnnnnnnnnnnnnnnnnnnnnnnnnnnnnnnnnnnnnnnnnnnnnnnnnnnnnnnnnnnnnggacuaguacuggcugcaucucccuuuccucuguccuccauccuucucccaggauggugaagggggaccugguacccagugauccccaccccaggauccuaaaucaugacuuaccugcuaauaaaaacucauuggaaaagugagaagaucuaaaaaaaaaaaaaaaaaaaaaaaaaaaaaaaaaaaaaaaaaaaaaaaaaaaaaaaaaaaaaaaaugcaucccccccccccccccccccccccccccccccaaaggcucuuuucagagccaccagaauu

SEQ ID NO: 334 - RNA, 2244 nt, Artificial Sequence
  mRNA product Slc7a3_RAV-G(GC)_Gnas_A64-C30-histoneSL
gggagagggcgcuuggcuugcaaggacccugagcugcggcauugaagcacacccaacccaacucgacugaagucagccucacugaaccggaucugagaaucuucucucucugggcuugccagggcucuccgaaccuagcuagcauccucuucaauuccaacuagaaagcuuaccauggugccccaggcccuccuguucgucccgcugcugguguucccccucugcuucggcaaguuccccaucuacaccauccccgacaagcuggggccguggagccccaucgacauccaccaccuguccugccccaacaaccucguggucgaggacgagggcugcaccaaccugagcggguucuccuacauggagcugaaggugggcuacaucagcgccaucaagaugaacggguucacgugcaccggcguggucaccgaggcggagaccuacacgaacuucgugggcuacgugaccaccaccuucaagcggaagcacuuccgccccacgccggacgccugccgggccgccuacaacuggaagauggccggggacccccgcuacgaggagucccuccacaaccccuaccccgacuaccacuggcugcggaccgucaagaccaccaaggagagccuggugaucaucuccccgagcguggcggaccucgaccccuacgaccgcucccugcacagccgggucuuccccggcgggaacugcuccggcguggccgugagcuccacguacugcagcaccaaccacgacuacaccaucuggaugcccgagaacccgcgccuggggauguccugcgacaucuucaccaacagccggggcaagcgcgccuccaagggcagcgagacgugcggguucgucgacgagcggggccucuacaagucccugaagggggccugcaagcugaagcucugcggcgugcugggccugcgccucauggacgggaccuggguggcgaugcagaccagcaacgagaccaaguggugcccccccggccagcuggucaaccugcacgacuuccggagcgacgagaucgagcaccucgugguggaggagcuggucaagaagcgcgaggagugccuggacgcccucgaguccaucaugacgaccaagagcguguccuuccggcgccugagccaccuccggaagcuggugcccggguucggcaaggccuacaccaucuucaacaagacccugauggaggccgacgcccacuacaaguccguccgcacguggaacgagaucaucccgagcaaggggugccugcgggugggcggccgcugccacccccacgucaacgggguguucuucaacggcaucauccucgggcccgacggcaacgugcugauccccgagaugcaguccagccugcuccagcagcacauggagcugcuggucuccagcgugaucccgcucaugcacccccuggcggaccccuccaccguguucaagaacggggacgaggccgaggacuucgucgaggugcaccuccccgacgugcacgagcggaucagcggcgucgaccugggccugccgaacugggggaaguacgugcugcucuccgccggcgcccugaccgcccugaugcugaucaucuuccucaugaccugcuggcgccgggugaaccggagcgagcccacgcagcacaaccugcgcgggaccggccgggaggucuccgugaccccgcagagcgggaagaucaucuccagcugggaguccuacaagagcggcggcgagaccgggcugugaggacuagugaagggaacacccaaauuuaauucagccuuaagcacaauuaauuaagagugaaacguaauuguacaagcaguuggucacccaccauagggcaugaucaacaccgcaaccuuuccuuuuucccccagugauucugaaaaaccccucuucccuucagcuugcuuagauguuccaaauuuaguaagcuuaaggcggccuacagaagaaaaagaaaaaaaaggccacaaaaguucccucucacuuucaguaaauaaaauaaaagcagcaacagaaauaaagaaauaaaugaaauucaaaaugaaauaaauauuguguugugcagcauuaaaaaaucaauaaaaauuaaaaaugagcaagaucuaaaaaaaaaaaaaaaaaaaaaaaaaaaaaaaaaaaaaaaaaaaaaaaaaaaaaaaaaaaaaaaaugcaucccccccccccccccccccccccccccccccaaaggcucuuuucagagccaccagaauu

SEQ ID NO: 335 - RNA, 2185 nt, Artificial Sequence
  mRNA product Slc7a3_RAV-G(GC)_Gnas_A64
gggagagggcgcuuggcuugcaaggacccugagcugcggcauugaagcacacccaacccaacucgacugaagucagccucacugaaccggaucugagaaucuucucucucugggcuugccagggcucuccgaaccuagcuagcauccucuucaauuccaacuagaaagcuuaccauggugccccaggcccuccuguucgucccgcugcugguguucccccucugcuucggcaaguuccccaucuacaccauccccgacaagcuggggccguggagccccaucgacauccaccaccuguccugccccaacaaccucguggucgaggacgagggcugcaccaaccugagcggguucuccuacauggagcugaaggugggcuacaucagcgccaucaagaugaacggguucacgugcaccggcguggucaccgaggcggagaccuacacgaacuucgugggcuacgugaccaccaccuucaagcggaagcacuuccgccccacgccggacgccugccgggccgccuacaacuggaagauggccggggacccccgcuacgaggagucccuccacaaccccuaccccgacuaccacuggcugcggaccgucaagaccaccaaggagagccuggugaucaucuccccgagcguggcggaccucgaccccuacgaccgcucccugcacagccgggucuuccccggcgggaacugcuccggcguggccgugagcuccacguacugcagcaccaaccacgacuacaccaucuggaugcccgagaacccgcgccuggggauguccugcgacaucuucaccaacagccggggcaagcgcgccuccaagggcagcgagacgugcggguucgucgacgagcggggccucuacaagucccugaagggggccugcaagcugaagcucugcggcgugcugggccugcgccucauggacgggaccuggguggcgaugcagaccagcaacgagaccaaguggugcccccccggccagcuggucaaccugcacgacuuccggagcgacgagaucgagcaccucgugguggaggagcuggucaagaagcgcgaggagugccuggacgcccucgaguccaucaugacgaccaagagcguguccuuccggcgccugagccaccuccggaagcuggugcccggguucggcaaggccuacaccaucuucaacaagacccugauggaggccgacgcccacuacaaguccguccgcacguggaacgagaucaucccgagcaaggggugccugcgggugggcggccgcugccacccccacgucaacgggguguucuucaacggcaucauccucgggcccgacggcaacgugcugauccccgagaugcaguccagccugcuccagcagcacauggagcugcuggucuccagcgugaucccgcucaugcacccccuggcggaccccuccaccguguucaagaacggggacgaggccgaggacuucgucgaggugcaccuccccgacgugcacgagcggaucagcggcgucgaccugggccugccgaacugggggaaguacgugcugcucuccgccggcgcccugaccgcccugaugcugaucaucuuccucaugaccugcuggcgccgggugaaccggagcgagcccacgcagcacaaccugcgcgggaccggccgggaggucuccgugaccccgcagagcgggaagaucaucuccagcugggaguccuacaagagcggcggcgagaccgggcugugaggacuagugaagggaacacccaaauuuaauucagccuuaagcacaauuaauuaagagugaaacguaauuguacaagcaguuggucacccaccauagggcaugaucaacaccgcaaccuuuccuuuuucccccagugauucugaaaaaccccucuucccuucagcuugcuuagauguuccaaauuuaguaagcuuaaggcggccuacagaagaaaaagaaaaaaaaggccacaaaaguucccucucacuuucaguaaauaaaauaaaagcagcaacagaaauaaagaaauaaaugaaauucaaaaugaaauaaauauuguguugugcagcauuaaaaaaucaauaaaaauuaaaaaugagcaagaucuaaaaaaaaaaaaaaaaaaaaaaaaaaaaaaaaaaaaaaaaaaaaaaaaaaaaaaaaaaaaaaaagaauu

SEQ ID NO: 336 - RNA, 1251 nt, Artificial Sequence
  mRNA product Slc7a3_HsEPO(GC)_Gnas_A64-C30-histoneSL
gggagagggcgcuuggcuugcaaggacccugagcugcggcauugaagcacacccaacccaacucgacugaagucagccucacugaaccggaucugagaaucuucucucucugggcuugccagggcucuccgaaccuagcuagcauccucuucaauuccaacuagaaagcuuaccaugggcgugcacgagugccccgccuggcuguggcuccugcugagccuccugucccugccgcucgggcugcccguccugggcgcccccccgcggcucaucugcgacagccgcgugcuggagcgguaccugcucgaggcgaaggaggccgagaacaucaccaccgggugcgccgagcacugcucccugaacgagaacaucacggugccggacaccaaggucaacuucuacgccuggaagcgcauggaggugggccagcaggccguggaggucuggcaggggcuggcgcuccugagcgaggccgugcugcggggccaggcccuccuggugaacuccagccagcccugggagccccugcagcuccacgucgacaaggccguguccggccugcgcagccugaccacccuccugcgggcgcugggggcccagaaggaggccaucucccccccggacgccgccagcgcggccccgcuccgcacgaucaccgccgacaccuuccggaagcuguuccgcguguacuccaacuuccugcggggcaagcucaagcuguacaccggggaggccugccgcacgggcgaccggugaggacuagugaagggaacacccaaauuuaauucagccuuaagcacaauuaauuaagagugaaacguaauuguacaagcaguuggucacccaccauagggcaugaucaacaccgcaaccuuuccuuuuucccccagugauucugaaaaaccccucuucccuucagcuugcuuagauguuccaaauuuaguaagcuuaaggcggccuacagaagaaaaagaaaaaaaaggccacaaaaguucccucucacuuucaguaaauaaaauaaaagcagcaacagaaauaaagaaauaaaugaaauucaaaaugaaauaaauauuguguugugcagcauuaaaaaaucaauaaaaauuaaaaaugagcaagaucuaaaaaaaaaaaaaaaaaaaaaaaaaaaaaaaaaaaaaaaaaaaaaaaaaaaaaaaaaaaaaaaaugcaucccccccccccccccccccccccccccccccaaaggcucuuuucagagccaccagaauu

SEQ ID NO: 337 - RNA, 1192 nt, Artificial Sequence
  mRNA product Slc7a3_HsEPO(GC)_Gnas_A64
gggagagggcgcuuggcuugcaaggacccugagcugcggcauugaagcacacccaacccaacucgacugaagucagccucacugaaccggaucugagaaucuucucucucugggcuugccagggcucuccgaaccuagcuagcauccucuucaauuccaacuagaaagcuuaccaugggcgugcacgagugccccgccuggcuguggcuccugcugagccuccugucccugccgcucgggcugcccguccugggcgcccccccgcggcucaucugcgacagccgcgugcuggagcgguaccugcucgaggcgaaggaggccgagaacaucaccaccgggugcgccgagcacugcucccugaacgagaacaucacggugccggacaccaaggucaacuucuacgccuggaagcgcauggaggugggccagcaggccguggaggucuggcaggggcuggcgcuccugagcgaggccgugcugcggggccaggcccuccuggugaacuccagccagcccugggagccccugcagcuccacgucgacaaggccguguccggccugcgcagccugaccacccuccugcgggcgcugggggcccagaaggaggccaucucccccccggacgccgccagcgcggccccgcuccgcacgaucaccgccgacaccuuccggaagcuguuccgcguguacuccaacuuccugcggggcaagcucaagcuguacaccggggaggccugccgcacgggcgaccggugaggacuagugaagggaacacccaaauuuaauucagccuuaagcacaauuaauuaagagugaaacguaauuguacaagcaguuggucacccaccauagggcaugaucaacaccgcaaccuuuccuuuuucccccagugauucugaaaaaccccucuucccuucagcuugcuuagauguuccaaauuuaguaagcuuaaggcggccuacagaagaaaaagaaaaaaaaggccacaaaaguucccucucacuuucaguaaauaaaauaaaagcagcaacagaaauaaagaaauaaaugaaauucaaaaugaaauaaauauuguguugugcagcauuaaaaaaucaauaaaaauuaaaaaugagcaagaucuaaaaaaaaaaaaaaaaaaaaaaaaaaaaaaaaaaaaaaaaaaaaaaaaaaaaaaaaaaaaaaaagaauu

SEQ ID NO: 338 - RNA, 2322 nt, Artificial Sequence
  mRNA product Slc7a3_PpLuc(GC)_Gnas_A64-C30-histoneSL
gggagagggcgcuuggcuugcaaggacccugagcugcggcauugaagcacacccaacccaacucgacugaagucagccucacugaaccggaucugagaaucuucucucucugggcuugccagggcucuccgaaccuagcuagcauccucuucaauuccaacuagaaagcuuaccauggaggacgccaagaacaucaagaagggcccggcgcccuucuacccgcuggaggacgggaccgccggcgagcagcuccacaaggccaugaagcgguacgcccuggugccgggcacgaucgccuucaccgacgcccacaucgaggucgacaucaccuacgcggaguacuucgagaugagcgugcgccuggccgaggccaugaagcgguacggccugaacaccaaccaccggaucguggugugcucggagaacagccugcaguucuucaugccggugcugggcgcccucuucaucggcguggccgucgccccggcgaacgacaucuacaacgagcgggagcugcugaacagcauggggaucagccagccgaccgugguguucgugagcaagaagggccugcagaagauccugaacgugcagaagaagcugcccaucauccagaagaucaucaucauggacagcaagaccgacuaccagggcuuccagucgauguacacguucgugaccagccaccucccgccgggcuucaacgaguacgacuucgucccggagagcuucgaccgggacaagaccaucgcccugaucaugaacagcagcggcagcaccggccugccgaaggggguggcccugccgcaccggaccgccugcgugcgcuucucgcacgcccgggaccccaucuucggcaaccagaucaucccggacaccgccauccugagcguggugccguuccaccacggcuucggcauguucacgacccugggcuaccucaucugcggcuuccgggugguccugauguaccgguucgaggaggagcuguuccugcggagccugcaggacuacaagauccagagcgcgcugcucgugccgacccuguucagcuucuucgccaagagcacccugaucgacaaguacgaccugucgaaccugcacgagaucgccagcgggggcgccccgcugagcaaggaggugggcgaggccguggccaagcgguuccaccucccgggcauccgccagggcuacggccugaccgagaccacgagcgcgauccugaucacccccgagggggacgacaagccgggcgccgugggcaagguggucccguucuucgaggccaaggugguggaccuggacaccggcaagacccugggcgugaaccagcggggcgagcugugcgugcgggggccgaugaucaugagcggcuacgugaacaacccggaggccaccaacgcccucaucgacaaggacggcuggcugcacagcggcgacaucgccuacugggacgaggacgagcacuucuucaucgucgaccggcugaagucgcugaucaaguacaagggcuaccagguggcgccggccgagcuggagagcauccugcuccagcaccccaacaucuucgacgccggcguggccgggcugccggacgacgacgccggcgagcugccggccgcggugguggugcuggagcacggcaagaccaugacggagaaggagaucgucgacuacguggccagccaggugaccaccgccaagaagcugcggggcggcgugguguucguggacgaggucccgaagggccugaccgggaagcucgacgcccggaagauccgcgagauccugaucaaggccaagaagggcggcaagaucgccgugugaggacuagugaagggaacacccaaauuuaauucagccuuaagcacaauuaauuaagagugaaacguaauuguacaagcaguuggucacccaccauagggcaugaucaacaccgcaaccuuuccuuuuucccccagugauucugaaaaaccccucuucccuucagcuugcuuagauguuccaaauuuaguaagcuuaaggcggccuacagaagaaaaagaaaaaaaaggccacaaaaguucccucucacuuucaguaaauaaaauaaaagcagcaacagaaauaaagaaauaaaugaaauucaaaaugaaauaaauauuguguugugcagcauuaaaaaaucaauaaaaauuaaaaaugagcaagaucuaaaaaaaaaaaaaaaaaaaaaaaaaaaaaaaaaaaaaaaaaaaaaaaaaaaaaaaaaaaaaaaaugcaucccccccccccccccccccccccccccccccaaaggcucuuuucagagccaccagaauu

SEQ ID NO: 339 - RNA, 2263 nt, Artificial Sequence
  mRNA product Slc7a3_PpLuc(GC)_Gnas_A64
gggagagggcgcuuggcuugcaaggacccugagcugcggcauugaagcacacccaacccaacucgacugaagucagccucacugaaccggaucugagaaucuucucucucugggcuugccagggcucuccgaaccuagcuagcauccucuucaauuccaacuagaaagcuuaccauggaggacgccaagaacaucaagaagggcccggcgcccuucuacccgcuggaggacgggaccgccggcgagcagcuccacaaggccaugaagcgguacgcccuggugccgggcacgaucgccuucaccgacgcccacaucgaggucgacaucaccuacgcggaguacuucgagaugagcgugcgccuggccgaggccaugaagcgguacggccugaacaccaaccaccggaucguggugugcucggagaacagccugcaguucuucaugccggugcugggcgcccucuucaucggcguggccgucgccccggcgaacgacaucuacaacgagcgggagcugcugaacagcauggggaucagccagccgaccgugguguucgugagcaagaagggccugcagaagauccugaacgugcagaagaagcugcccaucauccagaagaucaucaucauggacagcaagaccgacuaccagggcuuccagucgauguacacguucgugaccagccaccucccgccgggcuucaacgaguacgacuucgucccggagagcuucgaccgggacaagaccaucgcccugaucaugaacagcagcggcagcaccggccugccgaaggggguggcccugccgcaccggaccgccugcgugcgcuucucgcacgcccgggaccccaucuucggcaaccagaucaucccggacaccgccauccugagcguggugccguuccaccacggcuucggcauguucacgacccugggcuaccucaucugcggcuuccgggugguccugauguaccgguucgaggaggagcuguuccugcggagccugcaggacuacaagauccagagcgcgcugcucgugccgacccuguucagcuucuucgccaagagcacccugaucgacaaguacgaccugucgaaccugcacgagaucgccagcgggggcgccccgcugagcaaggaggugggcgaggccguggccaagcgguuccaccucccgggcauccgccagggcuacggccugaccgagaccacgagcgcgauccugaucacccccgagggggacgacaagccgggcgccgugggcaagguggucccguucuucgaggccaaggugguggaccuggacaccggcaagacccugggcgugaaccagcggggcgagcugugcgugcgggggccgaugaucaugagcggcuacgugaacaacccggaggccaccaacgcccucaucgacaaggacggcuggcugcacagcggcgacaucgccuacugggacgaggacgagcacuucuucaucgucgaccggcugaagucgcugaucaaguacaagggcuaccagguggcgccggccgagcuggagagcauccugcuccagcaccccaacaucuucgacgccggcguggccgggcugccggacgacgacgccggcgagcugccggccgcggugguggugcuggagcacggcaagaccaugacggagaaggagaucgucgacuacguggccagccaggugaccaccgccaagaagcugcggggcggcgugguguucguggacgaggucccgaagggccugaccgggaagcucgacgcccggaagauccgcgagauccugaucaaggccaagaagggcggcaagaucgccgugugaggacuagugaagggaacacccaaauuuaauucagccuuaagcacaauuaauuaagagugaaacguaauuguacaagcaguuggucacccaccauagggcaugaucaacaccgcaaccuuuccuuuuucccccagugauucugaaaaaccccucuucccuucagcuugcuuagauguuccaaauuuaguaagcuuaaggcggccuacagaagaaaaagaaaaaaaaggccacaaaaguucccucucacuuucaguaaauaaaauaaaagcagcaacagaaauaaagaaauaaaugaaauucaaaaugaaauaaauauuguguugugcagcauuaaaaaaucaauaaaaauuaaaaaugagcaagaucuaaaaaaaaaaaaaaaaaaaaaaaaaaaaaaaaaaaaaaaaaaaaaaaaaaaaaaaaaaaaaaaagaauu

SEQ ID NO: 340 - RNA, 2331 nt, Artificial Sequence
  mRNA product Slc7a3_protein of interest example 5_Gnas_A64-C30-histoneSL
  misc_feature (175)..(1836): n is a, c, g, or u
gggagagggcgcuuggcuugcaaggacccugagcugcggcauugaagcacacccaacccaacucgacugaagucagccucacugaaccggaucugagaaucuucucucucugggcuugccagggcucuccgaaccuagcuagcauccucuucaauuccaacuagaaagcuuaccnnnnnnnnnnnnnnnnnnnnnnnnnnnnnnnnnnnnnnnnnnnnnnnnnnnnnnnnnnnnnnnnnnnnnnnnnnnnnnnnnnnnnnnnnnnnnnnnnnnnnnnnnnnnnnnnnnnnnnnnnnnnnnnnnnnnnnnnnnnnnnnnnnnnnnnnnnnnnnnnnnnnnnnnnnnnnnnnnnnnnnnnnnnnnnnnnnnnnnnnnnnnnnnnnnnnnnnnnnnnnnnnnnnnnnnnnnnnnnnnnnnnnnnnnnnnnnnnnnnnnnnnnnnnnnnnnnnnnnnnnnnnnnnnnnnnnnnnnnnnnnnnnnnnnnnnnnnnnnnnnnnnnnnnnnnnnnnnnnnnnnnnnnnnnnnnnnnnnnnnnnnnnnnnnnnnnnnnnnnnnnnnnnnnnnnnnnnnnnnnnnnnnnnnnnnnnnnnnnnnnnnnnnnnnnnnnnnnnnnnnnnnnnnnnnnnnnnnnnnnnnnnnnnnnnnnnnnnnnnnnnnnnnnnnnnnnnnnnnnnnnnnnnnnnnnnnnnnnnnnnnnnnnnnnnnnnnnnnnnnnnnnnnnnnnnnnnnnnnnnnnnnnnnnnnnnnnnnnnnnnnnnnnnnnnnnnnnnnnnnnnnnnnnnnnnnnnnnnnnnnnnnnnnnnnnnnnnnnnnnnnnnnnnnnnnnnnnnnnnnnnnnnnnnnnnnnnnnnnnnnnnnnnnnnnnnnnnnnnnnnnnnnnnnnnnnnnnnnnnnnnnnnnnnnnnnnnnnnnnnnnnnnnnnnnnnnnnnnnnnnnnnnnnnnnnnnnnnnnnnnnnnnnnnnnnnnnnnnnnnnnnnnnnnnnnnnnnnnnnnnnnnnnnnnnnnnnnnnnnnnnnnnnnnnnnnnnnnnnnnnnnnnnnnnnnnnnnnnnnnnnnnnnnnnnnnnnnnnnnnnnnnnnnnnnnnnnnnnnnnnnnnnnnnnnnnnnnnnnnnnnnnnnnnnnnnnnnnnnnnnnnnnnnnnnnnnnnnnnnnnnnnnnnnnnnnnnnnnnnnnnnnnnnnnnnnnnnnnnnnnnnnnnnnnnnnnnnnnnnnnnnnnnnnnnnnnnnnnnnnnnnnnnnnnnnnnnnnnnnnnnnnnnnnnnnnnnnnnnnnnnnnnnnnnnnnnnnnnnnnnnnnnnnnnnnnnnnnnnnnnnnnnnnnnnnnnnnnnnnnnnnnnnnnnnnnnnnnnnnnnnnnnnnnnnnnnnnnnnnnnnnnnnnnnnnnnnnnnnnnnnnnnnnnnnnnnnnnnnnnnnnnnnnnnnnnnnnnnnnnnnnnnnnnnnnnnnnnnnnnnnnnnnnnnnnnnnnnnnnnnnnnnnnnnnnnnnnnnnnnnnnnnnnnnnnnnnnnnnnnnnnnnnnnnnnnnnnnnnnnnnnnnnnnnnnnnnnnnnnnnnnnnnnnnnnnnnnnnnnnnnnnnnnnnnnnnnnnnnnnnnnnnnnnnnnnnnnnnnnnnnnnnnnnnnnnnnnnnnnnnnnnnnnnnnnnnnnnnnnnnnnnnnnnnnnnnnnnnnnnnnnnnnnnnnnnnnnnnnnnnnnnnnnnnnnnnnnnnnnnnnnnnnnnnnnnnnnnnnnnnnnnnnnnnnnnnnnnnnnnnnnnnnnnnnnnnnnnnnnnnnnnnnnnnnnnnnnnnnnnnnnnnnnnnnnnnnnnnnnnnnnnnnnnnnnnnnnnnnnnnnggacuagugaagggaacacccaaauuuaauucagccuuaagcacaauuaauuaagagugaaacguaauuguacaagcaguuggucacccaccauagggcaugaucaacaccgcaaccuuuccuuuuucccccagugauucugaaaaaccccucuucccuucagcuugcuuagauguuccaaauuuaguaagcuuaaggcggccuacagaagaaaaagaaaaaaaaggccacaaaaguucccucucacuuucaguaaauaaaauaaaagcagcaacagaaauaaagaaauaaaugaaauucaaaaugaaauaaauauuguguugugcagcauuaaaaaaucaauaaaaauuaaaaaugagcaagaucuaaaaaaaaaaaaaaaaaaaaaaaaaaaaaaaaaaaaaaaaaaaaaaaaaaaaaaaaaaaaaaaaugcaucccccccccccccccccccccccccccccccaaaggcucuuuucagagccaccagaauu

SEQ ID NO: 341 - RNA, 2024 nt, Artificial Sequence
  mRNA product Slc7a3_RAV-G(GC)_Ndufa1_A64-C30-histoneSL
gggagagggcgcuuggcuugcaaggacccugagcugcggcauugaagcacacccaacccaacucgacugaagucagccucacugaaccggaucugagaaucuucucucucugggcuugccagggcucuccgaaccuagcuagcauccucuucaauuccaacuagaaagcuuaccauggugccccaggcccuccuguucgucccgcugcugguguucccccucugcuucggcaaguuccccaucuacaccauccccgacaagcuggggccguggagccccaucgacauccaccaccuguccugccccaacaaccucguggucgaggacgagggcugcaccaaccugagcggguucuccuacauggagcugaaggugggcuacaucagcgccaucaagaugaacggguucacgugcaccggcguggucaccgaggcggagaccuacacgaacuucgugggcuacgugaccaccaccuucaagcggaagcacuuccgccccacgccggacgccugccgggccgccuacaacuggaagauggccggggacccccgcuacgaggagucccuccacaaccccuaccccgacuaccacuggcugcggaccgucaagaccaccaaggagagccuggugaucaucuccccgagcguggcggaccucgaccccuacgaccgcucccugcacagccgggucuuccccggcgggaacugcuccggcguggccgugagcuccacguacugcagcaccaaccacgacuacaccaucuggaugcccgagaacccgcgccuggggauguccugcgacaucuucaccaacagccggggcaagcgcgccuccaagggcagcgagacgugcggguucgucgacgagcggggccucuacaagucccugaagggggccugcaagcugaagcucugcggcgugcugggccugcgccucauggacgggaccuggguggcgaugcagaccagcaacgagaccaaguggugcccccccggccagcuggucaaccugcacgacuuccggagcgacgagaucgagcaccucgugguggaggagcuggucaagaagcgcgaggagugccuggacgcccucgaguccaucaugacgaccaagagcguguccuuccggcgccugagccaccuccggaagcuggugcccggguucggcaaggccuacaccaucuucaacaagacccugauggaggccgacgcccacuacaaguccguccgcacguggaacgagaucaucccgagcaaggggugccugcgggugggcggccgcugccacccccacgucaacgggguguucuucaacggcaucauccucgggcccgacggcaacgugcugauccccgagaugcaguccagccugcuccagcagcacauggagcugcuggucuccagcgugaucccgcucaugcacccccuggcggaccccuccaccguguucaagaacggggacgaggccgaggacuucgucgaggugcaccuccccgacgugcacgagcggaucagcggcgucgaccugggccugccgaacugggggaaguacgugcugcucuccgccggcgcccugaccgcccugaugcugaucaucuuccucaugaccugcuggcgccgggugaaccggagcgagcccacgcagcacaaccugcgcgggaccggccgggaggucuccgugaccccgcagagcgggaagaucaucuccagcugggaguccuacaagagcggcggcgagaccgggcugugaggacuaguggaagcauuuuccuggcugauuaaaagaaauuacucagcuauggucaucuguuccuguuagaaggcuaugcagcauauuauauacuaugcgcauguuaugaaaugcauaauaaaaaauuuuaaaaaaucuaaaagaucuaaaaaaaaaaaaaaaaaaaaaaaaaaaaaaaaaaaaaaaaaaaaaaaaaaaaaaaaaaaaaaaaugcaucccccccccccccccccccccccccccccccaaaggcucuuuucagagccaccagaauu

SEQ ID NO: 342 - RNA, 1965 nt, Artificial Sequence
  mRNA product Slc7a3_RAV-G(GC)_Ndufa1_A64
gggagagggcgcuuggcuugcaaggacccugagcugcggcauugaagcacacccaacccaacucgacugaagucagccucacugaaccggaucugagaaucuucucucucugggcuugccagggcucuccgaaccuagcuagcauccucuucaauuccaacuagaaagcuuaccauggugccccaggcccuccuguucgucccgcugcugguguucccccucugcuucggcaaguuccccaucuacaccauccccgacaagcuggggccguggagccccaucgacauccaccaccuguccugccccaacaaccucguggucgaggacgagggcugcaccaaccugagcggguucuccuacauggagcugaaggugggcuacaucagcgccaucaagaugaacggguucacgugcaccggcguggucaccgaggcggagaccuacacgaacuucgugggcuacgugaccaccaccuucaagcggaagcacuuccgccccacgccggacgccugccgggccgccuacaacuggaagauggccggggacccccgcuacgaggagucccuccacaaccccuaccccgacuaccacuggcugcggaccgucaagaccaccaaggagagccuggugaucaucuccccgagcguggcggaccucgaccccuacgaccgcucccugcacagccgggucuuccccggcgggaacugcuccggcguggccgugagcuccacguacugcagcaccaaccacgacuacaccaucuggaugcccgagaacccgcgccuggggauguccugcgacaucuucaccaacagccggggcaagcgcgccuccaagggcagcgagacgugcggguucgucgacgagcggggccucuacaagucccugaagggggccugcaagcugaagcucugcggcgugcugggccugcgccucauggacgggaccuggguggcgaugcagaccagcaacgagaccaaguggugcccccccggccagcuggucaaccugcacgacuuccggagcgacgagaucgagcaccucgugguggaggagcuggucaagaagcgcgaggagugccuggacgcccucgaguccaucaugacgaccaagagcguguccuuccggcgccugagccaccuccggaagcuggugcccggguucggcaaggccuacaccaucuucaacaagacccugauggaggccgacgcccacuacaaguccguccgcacguggaacgagaucaucccgagcaaggggugccugcgggugggcggccgcugccacccccacgucaacgggguguucuucaacggcaucauccucgggcccgacggcaacgugcugauccccgagaugcaguccagccugcuccagcagcacauggagcugcuggucuccagcgugaucccgcucaugcacccccuggcggaccccuccaccguguucaagaacggggacgaggccgaggacuucgucgaggugcaccuccccgacgugcacgagcggaucagcggcgucgaccugggccugccgaacugggggaaguacgugcugcucuccgccggcgcccugaccgcccugaugcugaucaucuuccucaugaccugcuggcgccgggugaaccggagcgagcccacgcagcacaaccugcgcgggaccggccgggaggucuccgugaccccgcagagcgggaagaucaucuccagcugggaguccuacaagagcggcggcgagaccgggcugugaggacuaguggaagcauuuuccuggcugauuaaaagaaauuacucagcuauggucaucuguuccuguuagaaggcuaugcagcauauuauauacuaugcgcauguuaugaaaugcauaauaaaaaauuuuaaaaaaucuaaaagaucuaaaaaaaaaaaaaaaaaaaaaaaaaaaaaaaaaaaaaaaaaaaaaaaaaaaaaaaaaaaaaaaagaauu

SEQ ID NO: 343 - RNA, 1031 nt, Artificial Sequence
  mRNA product Slc7a3_HsEPO(GC)_Ndufa1_A64-C30-histoneSL
gggagagggcgcuuggcuugcaaggacccugagcugcggcauugaagcacacccaacccaacucgacugaagucagccucacugaaccggaucugagaaucuucucucucugggcuugccagggcucuccgaaccuagcuagcauccucuucaauuccaacuagaaagcuuaccaugggcgugcacgagugccccgccuggcuguggcuccugcugagccuccugucccugccgcucgggcugcccguccugggcgcccccccgcggcucaucugcgacagccgcgugcuggagcgguaccugcucgaggcgaaggaggccgagaacaucaccaccgggugcgccgagcacugcucccugaacgagaacaucacggugccggacaccaaggucaacuucuacgccuggaagcgcauggaggugggccagcaggccguggaggucuggcaggggcuggcgcuccugagcgaggccgugcugcggggccaggcccuccuggugaacuccagccagcccugggagccccugcagcuccacgucgacaaggccguguccggccugcgcagccugaccacccuccugcgggcgcugggggcccagaaggaggccaucucccccccggacgccgccagcgcggccccgcuccgcacgaucaccgccgacaccuuccggaagcuguuccgcguguacuccaacuuccugcggggcaagcucaagcuguacaccggggaggccugccgcacgggcgaccggugaggacuaguggaagcauuuuccuggcugauuaaaagaaauuacucagcuauggucaucuguuccuguuagaaggcuaugcagcauauuauauacuaugcgcauguuaugaaaugcauaauaaaaaauuuuaaaaaaucuaaaagaucuaaaaaaaaaaaaaaaaaaaaaaaaaaaaaaaaaaaaaaaaaaaaaaaaaaaaaaaaaaaaaaaaugcaucccccccccccccccccccccccccccccccaaaggcucuuuucagagccaccagaauu

SEQ ID NO: 344 - RNA, 972 nt, Artificial Sequence
  mRNA product Slc7a3_HsEPO(GC)_Ndufa1_A64
gggagagggcgcuuggcuugcaaggacccugagcugcggcauugaagcacacccaacccaacucgacugaagucagccucacugaaccggaucugagaaucuucucucucugggcuugccagggcucuccgaaccuagcuagcauccucuucaauuccaacuagaaagcuuaccaugggcgugcacgagugccccgccuggcuguggcuccugcugagccuccugucccugccgcucgggcugcccguccugggcgcccccccgcggcucaucugcgacagccgcgugcuggagcgguaccugcucgaggcgaaggaggccgagaacaucaccaccgggugcgccgagcacugcucccugaacgagaacaucacggugccggacaccaaggucaacuucuacgccuggaagcgcauggaggugggccagcaggccguggaggucuggcaggggcuggcgcuccugagcgaggccgugcugcggggccaggcccuccuggugaacuccagccagcccugggagccccugcagcuccacgucgacaaggccguguccggccugcgcagccugaccacccuccugcgggcgcugggggcccagaaggaggccaucucccccccggacgccgccagcgcggccccgcuccgcacgaucaccgccgacaccuuccggaagcuguuccgcguguacuccaacuuccugcggggcaagcucaagcuguacaccggggaggccugccgcacgggcgaccggugaggacuaguggaagcauuuuccuggcugauuaaaagaaauuacucagcuauggucaucuguuccuguuagaaggcuaugcagcauauuauauacuaugcgcauguuaugaaaugcauaauaaaaaauuuuaaaaaaucuaaaagaucuaaaaaaaaaaaaaaaaaaaaaaaaaaaaaaaaaaaaaaaaaaaaaaaaaaaaaaaaaaaaaaaagaauu

SEQ ID NO: 345 - RNA, 2102 nt, Artificial Sequence
  mRNA product Slc7a3_PpLuc(GC)_Ndufa1_A64-C30-histoneSL
gggagagggcgcuuggcuugcaaggacccugagcugcggcauugaagcacacccaacccaacucgacugaagucagccucacugaaccggaucugagaaucuucucucucugggcuugccagggcucuccgaaccuagcuagcauccucuucaauuccaacuagaaagcuuaccauggaggacgccaagaacaucaagaagggcccggcgcccuucuacccgcuggaggacgggaccgccggcgagcagcuccacaaggccaugaagcgguacgcccuggugccgggcacgaucgccuucaccgacgcccacaucgaggucgacaucaccuacgcggaguacuucgagaugagcgugcgccuggccgaggccaugaagcgguacggccugaacaccaaccaccggaucguggugugcucggagaacagccugcaguucuucaugccggugcugggcgcccucuucaucggcguggccgucgccccggcgaacgacaucuacaacgagcgggagcugcugaacagcauggggaucagccagccgaccgugguguucgugagcaagaagggccugcagaagauccugaacgugcagaagaagcugcccaucauccagaagaucaucaucauggacagcaagaccgacuaccagggcuuccagucgauguacacguucgugaccagccaccucccgccgggcuucaacgaguacgacuucgucccggagagcuucgaccgggacaagaccaucgcccugaucaugaacagcagcggcagcaccggccugccgaaggggguggcccugccgcaccggaccgccugcgugcgcuucucgcacgcccgggaccccaucuucggcaaccagaucaucccggacaccgccauccugagcguggugccguuccaccacggcuucggcauguucacgacccugggcuaccucaucugcggcuuccgggugguccugauguaccgguucgaggaggagcuguuccugcggagccugcaggacuacaagauccagagcgcgcugcucgugccgacccuguucagcuucuucgccaagagcacccugaucgacaaguacgaccugucgaaccugcacgagaucgccagcgggggcgccccgcugagcaaggaggugggcgaggccguggccaagcgguuccaccucccgggcauccgccagggcuacggccugaccgagaccacgagcgcgauccugaucacccccgagggggacgacaagccgggcgccgugggcaagguggucccguucuucgaggccaaggugguggaccuggacaccggcaagacccugggcgugaaccagcggggcgagcugugcgugcgggggccgaugaucaugagcggcuacgugaacaacccggaggccaccaacgcccucaucgacaaggacggcuggcugcacagcggcgacaucgccuacugggacgaggacgagcacuucuucaucgucgaccggcugaagucgcugaucaaguacaagggcuaccagguggcgccggccgagcuggagagcauccugcuccagcaccccaacaucuucgacgccggcguggccgggcugccggacgacgacgccggcgagcugccggccgcggugguggugcuggagcacggcaagaccaugacggagaaggagaucgucgacuacguggccagccaggugaccaccgccaagaagcugcggggcggcgugguguucguggacgaggucccgaagggccugaccgggaagcucgacgcccggaagauccgcgagauccugaucaaggccaagaagggcggcaagaucgccgugugaggacuaguggaagcauuuuccuggcugauuaaaagaaauuacucagcuauggucaucuguuccuguuagaaggcuaugcagcauauuauauacuaugcgcauguuaugaaaugcauaauaaaaaauuuuaaaaaaucuaaaagaucuaaaaaaaaaaaaaaaaaaaaaaaaaaaaaaaaaaaaaaaaaaaaaaaaaaaaaaaaaaaaaaaaugcaucccccccccccccccccccccccccccccccaaaggcucuuuucagagccaccagaauu

SEQ ID NO: 346 - RNA, 2043 nt, Artificial Sequence
  mRNA product Slc7a3_PpLuc(GC)_Ndufa1_A64
gggagagggcgcuuggcuugcaaggacccugagcugcggcauugaagcacacccaacccaacucgacugaagucagccucacugaaccggaucugagaaucuucucucucugggcuugccagggcucuccgaaccuagcuagcauccucuucaauuccaacuagaaagcuuaccauggaggacgccaagaacaucaagaagggcccggcgcccuucuacccgcuggaggacgggaccgccggcgagcagcuccacaaggccaugaagcgguacgcccuggugccgggcacgaucgccuucaccgacgcccacaucgaggucgacaucaccuacgcggaguacuucgagaugagcgugcgccuggccgaggccaugaagcgguacggccugaacaccaaccaccggaucguggugugcucggagaacagccugcaguucuucaugccggugcugggcgcccucuucaucggcguggccgucgccccggcgaacgacaucuacaacgagcgggagcugcugaacagcauggggaucagccagccgaccgugguguucgugagcaagaagggccugcagaagauccugaacgugcagaagaagcugcccaucauccagaagaucaucaucauggacagcaagaccgacuaccagggcuuccagucgauguacacguucgugaccagccaccucccgccgggcuucaacgaguacgacuucgucccggagagcuucgaccgggacaagaccaucgcccugaucaugaacagcagcggcagcaccggccugccgaaggggguggcccugccgcaccggaccgccugcgugcgcuucucgcacgcccgggaccccaucuucggcaaccagaucaucccggacaccgccauccugagcguggugccguuccaccacggcuucggcauguucacgacccugggcuaccucaucugcggcuuccgggugguccugauguaccgguucgaggaggagcuguuccugcggagccugcaggacuacaagauccagagcgcgcugcucgugccgacccuguucagcuucuucgccaagagcacccugaucgacaaguacgaccugucgaaccugcacgagaucgccagcgggggcgccccgcugagcaaggaggugggcgaggccguggccaagcgguuccaccucccgggcauccgccagggcuacggccugaccgagaccacgagcgcgauccugaucacccccgagggggacgacaagccgggcgccgugggcaagguggucccguucuucgaggccaaggugguggaccuggacaccggcaagacccugggcgugaaccagcggggcgagcugugcgugcgggggccgaugaucaugagcggcuacgugaacaacccggaggccaccaacgcccucaucgacaaggacggcuggcugcacagcggcgacaucgccuacugggacgaggacgagcacuucuucaucgucgaccggcugaagucgcugaucaaguacaagggcuaccagguggcgccggccgagcuggagagcauccugcuccagcaccccaacaucuucgacgccggcguggccgggcugccggacgacgacgccggcgagcugccggccgcggugguggugcuggagcacggcaagaccaugacggagaaggagaucgucgacuacguggccagccaggugaccaccgccaagaagcugcggggcggcgugguguucguggacgaggucccgaagggccugaccgggaagcucgacgcccggaagauccgcgagauccugaucaaggccaagaagggcggcaagaucgccgugugaggacuaguggaagcauuuuccuggcugauuaaaagaaauuacucagcuauggucaucuguuccuguuagaaggcuaugcagcauauuauauacuaugcgcauguuaugaaaugcauaauaaaaaauuuuaaaaaaucuaaaagaucuaaaaaaaaaaaaaaaaaaaaaaaaaaaaaaaaaaaaaaaaaaaaaaaaaaaaaaaaaaaaaaaagaauu

SEQ ID NO: 347 - RNA, 2111 nt, Artificial Sequence
  mRNA product Slc7a3_protein of interest example 5_Ndufa1_A64-C30-histoneSL
  misc_feature (175)..(1836): n is a, c, g, or u
gggagagggcgcuuggcuugcaaggacccugagcugcggcauugaagcacacccaacccaacucgacugaagucagccucacugaaccggaucugagaaucuucucucucugggcuugccagggcucuccgaaccuagcuagcauccucuucaauuccaacuagaaagcuuaccnnnnnnnnnnnnnnnnnnnnnnnnnnnnnnnnnnnnnnnnnnnnnnnnnnnnnnnnnnnnnnnnnnnnnnnnnnnnnnnnnnnnnnnnnnnnnnnnnnnnnnnnnnnnnnnnnnnnnnnnnnnnnnnnnnnnnnnnnnnnnnnnnnnnnnnnnnnnnnnnnnnnnnnnnnnnnnnnnnnnnnnnnnnnnnnnnnnnnnnnnnnnnnnnnnnnnnnnnnnnnnnnnnnnnnnnnnnnnnnnnnnnnnnnnnnnnnnnnnnnnnnnnnnnnnnnnnnnnnnnnnnnnnnnnnnnnnnnnnnnnnnnnnnnnnnnnnnnnnnnnnnnnnnnnnnnnnnnnnnnnnnnnnnnnnnnnnnnnnnnnnnnnnnnnnnnnnnnnnnnnnnnnnnnnnnnnnnnnnnnnnnnnnnnnnnnnnnnnnnnnnnnnnnnnnnnnnnnnnnnnnnnnnnnnnnnnnnnnnnnnnnnnnnnnnnnnnnnnnnnnnnnnnnnnnnnnnnnnnnnnnnnnnnnnnnnnnnnnnnnnnnnnnnnnnnnnnnnnnnnnnnnnnnnnnnnnnnnnnnnnnnnnnnnnnnnnnnnnnnnnnnnnnnnnnnnnnnnnnnnnnnnnnnnnnnnnnnnnnnnnnnnnnnnnnnnnnnnnnnnnnnnnnnnnnnnnnnnnnnnnnnnnnnnnnnnnnnnnnnnnnnnnnnnnnnnnnnnnnnnnnnnnnnnnnnnnnnnnnnnnnnnnnnnnnnnnnnnnnnnnnnnnnnnnnnnnnnnnnnnnnnnnnnnnnnnnnnnnnnnnnnnnnnnnnnnnnnnnnnnnnnnnnnnnnnnnnnnnnnnnnnnnnnnnnnnnnnnnnnnnnnnnnnnnnnnnnnnnnnnnnnnnnnnnnnnnnnnnnnnnnnnnnnnnnnnnnnnnnnnnnnnnnnnnnnnnnnnnnnnnnnnnnnnnnnnnnnnnnnnnnnnnnnnnnnnnnnnnnnnnnnnnnnnnnnnnnnnnnnnnnnnnnnnnnnnnnnnnnnnnnnnnnnnnnnnnnnnnnnnnnnnnnnnnnnnnnnnnnnnnnnnnnnnnnnnnnnnnnnnnnnnnnnnnnnnnnnnnnnnnnnnnnnnnnnnnnnnnnnnnnnnnnnnnnnnnnnnnnnnnnnnnnnnnnnnnnnnnnnnnnnnnnnnnnnnnnnnnnnnnnnnnnnnnnnnnnnnnnnnnnnnnnnnnnnnnnnnnnnnnnnnnnnnnnnnnnnnnnnnnnnnnnnnnnnnnnnnnnnnnnnnnnnnnnnnnnnnnnnnnnnnnnnnnnnnnnnnnnnnnnnnnnnnnnnnnnnnnnnnnnnnnnnnnnnnnnnnnnnnnnnnnnnnnnnnnnnnnnnnnnnnnnnnnnnnnnnnnnnnnnnnnnnnnnnnnnnnnnnnnnnnnnnnnnnnnnnnnnnnnnnnnnnnnnnnnnnnnnnnnnnnnnnnnnnnnnnnnnnnnnnnnnnnnnnnnnnnnnnnnnnnnnnnnnnnnnnnnnnnnnnnnnnnnnnnnnnnnnnnnnnnnnnnnnnnnnnnnnnnnnnnnnnnnnnnnnnnnnnnnnnnnnnnnnnnnnnnnnnnnnnnnnnnnnnnnnnnnnnnnnnnnnnnnnnnnnnnnnnnnnnnnnnnnnnnnnnnnnnnnnnnnnnnnnnnnnnnnnnnnnnnnnnnnnnnnnnnnnnnnnggacuaguggaagcauuuuccuggcugauuaaaagaaauuacucagcuauggucaucuguuccuguuagaaggcuaugcagcauauuauauacuaugcgcauguuaugaaaugcauaauaaaaaauuuuaaaaaaucuaaaagaucuaaaaaaaaaaaaaaaaaaaaaaaaaaaaaaaaaaaaaaaaaaaaaaaaaaaaaaaaaaaaaaaaugcaucccccccccccccccccccccccccccccccaaaggcucuuuucagagccaccagaauu

SEQ ID NO: 348 - RNA, 1961 nt, Artificial Sequence
  mRNA product Slc7a3_RAV-G(GC)_RPS9_A64-C30-histoneSL
gggagagggcgcuuggcuugcaaggacccugagcugcggcauugaagcacacccaacccaacucgacugaagucagccucacugaaccggaucugagaaucuucucucucugggcuugccagggcucuccgaaccuagcuagcauccucuucaauuccaacuagaaagcuuaccauggugccccaggcccuccuguucgucccgcugcugguguucccccucugcuucggcaaguuccccaucuacaccauccccgacaagcuggggccguggagccccaucgacauccaccaccuguccugccccaacaaccucguggucgaggacgagggcugcaccaaccugagcggguucuccuacauggagcugaaggugggcuacaucagcgccaucaagaugaacggguucacgugcaccggcguggucaccgaggcggagaccuacacgaacuucgugggcuacgugaccaccaccuucaagcggaagcacuuccgccccacgccggacgccugccgggccgccuacaacuggaagauggccggggacccccgcuacgaggagucccuccacaaccccuaccccgacuaccacuggcugcggaccgucaagaccaccaaggagagccuggugaucaucuccccgagcguggcggaccucgaccccuacgaccgcucccugcacagccgggucuuccccggcgggaacugcuccggcguggccgugagcuccacguacugcagcaccaaccacgacuacaccaucuggaugcccgagaacccgcgccuggggauguccugcgacaucuucaccaacagccggggcaagcgcgccuccaagggcagcgagacgugcggguucgucgacgagcggggccucuacaagucccugaagggggccugcaagcugaagcucugcggcgugcugggccugcgccucauggacgggaccuggguggcgaugcagaccagcaacgagaccaaguggugcccccccggccagcuggucaaccugcacgacuuccggagcgacgagaucgagcaccucgugguggaggagcuggucaagaagcgcgaggagugccuggacgcccucgaguccaucaugacgaccaagagcguguccuuccggcgccugagccaccuccggaagcuggugcccggguucggcaaggccuacaccaucuucaacaagacccugauggaggccgacgcccacuacaaguccguccgcacguggaacgagaucaucccgagcaaggggugccugcgggugggcggccgcugccacccccacgucaacgggguguucuucaacggcaucauccucgggcccgacggcaacgugcugauccccgagaugcaguccagccugcuccagcagcacauggagcugcuggucuccagcgugaucccgcucaugcacccccuggcggaccccuccaccguguucaagaacggggacgaggccgaggacuucgucgaggugcaccuccccgacgugcacgagcggaucagcggcgucgaccugggccugccgaacugggggaaguacgugcugcucuccgccggcgcccugaccgcccugaugcugaucaucuuccucaugaccugcuggcgccgggugaaccggagcgagcccacgcagcacaaccugcgcgggaccggccgggaggucuccgugaccccgcagagcgggaagaucaucuccagcugggaguccuacaagagcggcggcgagaccgggcugugaggacuaguguccaccugucccuccugggcugcuggauugucucguuuuccugccaaauaaacaggaucagcgcuuuacagaucuaaaaaaaaaaaaaaaaaaaaaaaaaaaaaaaaaaaaaaaaaaaaaaaaaaaaaaaaaaaaaaaaugcaucccccccccccccccccccccccccccccccaaaggcucuuuucagagccaccagaauu

SEQ ID NO: 349 - RNA, 1902 nt, Artificial Sequence
  mRNA product Slc7a3_RAV-G(GC)_RPS9_A64
gggagagggcgcuuggcuugcaaggacccugagcugcggcauugaagcacacccaacccaacucgacugaagucagccucacugaaccggaucugagaaucuucucucucugggcuugccagggcucuccgaaccuagcuagcauccucuucaauuccaacuagaaagcuuaccauggugccccaggcccuccuguucgucccgcugcugguguucccccucugcuucggcaaguuccccaucuacaccauccccgacaagcuggggccguggagccccaucgacauccaccaccuguccugccccaacaaccucguggucgaggacgagggcugcaccaaccugagcggguucuccuacauggagcugaaggugggcuacaucagcgccaucaagaugaacggguucacgugcaccggcguggucaccgaggcggagaccuacacgaacuucgugggcuacgugaccaccaccuucaagcggaagcacuuccgccccacgccggacgccugccgggccgccuacaacuggaagauggccggggacccccgcuacgaggagucccuccacaaccccuaccccgacuaccacuggcugcggaccgucaagaccaccaaggagagccuggugaucaucuccccgagcguggcggaccucgaccccuacgaccgcucccugcacagccgggucuuccccggcgggaacugcuccggcguggccgugagcuccacguacugcagcaccaaccacgacuacaccaucuggaugcccgagaacccgcgccuggggauguccugcgacaucuucaccaacagccggggcaagcgcgccuccaagggcagcgagacgugcggguucgucgacgagcggggccucuacaagucccugaagggggccugcaagcugaagcucugcggcgugcugggccugcgccucauggacgggaccuggguggcgaugcagaccagcaacgagaccaaguggugcccccccggccagcuggucaaccugcacgacuuccggagcgacgagaucgagcaccucgugguggaggagcuggucaagaagcgcgaggagugccuggacgcccucgaguccaucaugacgaccaagagcguguccuuccggcgccugagccaccuccggaagcuggugcccggguucggcaaggccuacaccaucuucaacaagacccugauggaggccgacgcccacuacaaguccguccgcacguggaacgagaucaucccgagcaaggggugccugcgggugggcggccgcugccacccccacgucaacgggguguucuucaacggcaucauccucgggcccgacggcaacgugcugauccccgagaugcaguccagccugcuccagcagcacauggagcugcuggucuccagcgugaucccgcucaugcacccccuggcggaccccuccaccguguucaagaacggggacgaggccgaggacuucgucgaggugcaccuccccgacgugcacgagcggaucagcggcgucgaccugggccugccgaacugggggaaguacgugcugcucuccgccggcgcccugaccgcccugaugcugaucaucuuccucaugaccugcuggcgccgggugaaccggagcgagcccacgcagcacaaccugcgcgggaccggccgggaggucuccgugaccccgcagagcgggaagaucaucuccagcugggaguccuacaagagcggcggcgagaccgggcugugaggacuaguguccaccugucccuccugggcugcuggauugucucguuuuccugccaaauaaacaggaucagcgcuuuacagaucuaaaaaaaaaaaaaaaaaaaaaaaaaaaaaaaaaaaaaaaaaaaaaaaaaaaaaaaaaaaaaaaagaauu

SEQ ID NO: 350 - RNA, 968 nt, Artificial Sequence
  mRNA product Slc7a3_HsEPO(GC)_RPS9_A64-C30-histoneSL
gggagagggcgcuuggcuugcaaggacccugagcugcggcauugaagcacacccaacccaacucgacugaagucagccucacugaaccggaucugagaaucuucucucucugggcuugccagggcucuccgaaccuagcuagcauccucuucaauuccaacuagaaagcuuaccaugggcgugcacgagugccccgccuggcuguggcuccugcugagccuccugucccugccgcucgggcugcccguccugggcgcccccccgcggcucaucugcgacagccgcgugcuggagcgguaccugcucgaggcgaaggaggccgagaacaucaccaccgggugcgccgagcacugcucccugaacgagaacaucacggugccggacaccaaggucaacuucuacgccuggaagcgcauggaggugggccagcaggccguggaggucuggcaggggcuggcgcuccugagcgaggccgugcugcggggccaggcccuccuggugaacuccagccagcccugggagccccugcagcuccacgucgacaaggccguguccggccugcgcagccugaccacccuccugcgggcgcugggggcccagaaggaggccaucucccccccggacgccgccagcgcggccccgcuccgcacgaucaccgccgacaccuuccggaagcuguuccgcguguacuccaacuuccugcggggcaagcucaagcuguacaccggggaggccugccgcacgggcgaccggugaggacuaguguccaccugucccuccugggcugcuggauugucucguuuuccugccaaauaaacaggaucagcgcuuuacagaucuaaaaaaaaaaaaaaaaaaaaaaaaaaaaaaaaaaaaaaaaaaaaaaaaaaaaaaaaaaaaaaaaugcaucccccccccccccccccccccccccccccccaaaggcucuuuucagagccaccagaauu

SEQ ID NO: 351 - RNA, 909 nt, Artificial Sequence
  mRNA product Slc7a3_HsEPO(GC)_RPS9_A64
gggagagggcgcuuggcuugcaaggacccugagcugcggcauugaagcacacccaacccaacucgacugaagucagccucacugaaccggaucugagaaucuucucucucugggcuugccagggcucuccgaaccuagcuagcauccucuucaauuccaacuagaaagcuuaccaugggcgugcacgagugccccgccuggcuguggcuccugcugagccuccugucccugccgcucgggcugcccguccugggcgcccccccgcggcucaucugcgacagccgcgugcuggagcgguaccugcucgaggcgaaggaggccgagaacaucaccaccgggugcgccgagcacugcucccugaacgagaacaucacggugccggacaccaaggucaacuucuacgccuggaagcgcauggaggugggccagcaggccguggaggucuggcaggggcuggcgcuccugagcgaggccgugcugcggggccaggcccuccuggugaacuccagccagcccugggagccccugcagcuccacgucgacaaggccguguccggccugcgcagccugaccacccuccugcgggcgcugggggcccagaaggaggccaucucccccccggacgccgccagcgcggccccgcuccgcacgaucaccgccgacaccuuccggaagcuguuccgcguguacuccaacuuccugcggggcaagcucaagcuguacaccggggaggccugccgcacgggcgaccggugaggacuaguguccaccugucccuccugggcugcuggauugucucguuuuccugccaaauaaacaggaucagcgcuuuacagaucuaaaaaaaaaaaaaaaaaaaaaaaaaaaaaaaaaaaaaaaaaaaaaaaaaaaaaaaaaaaaaaaagaauu

SEQ ID NO: 352 - RNA, 2039 nt, Artificial Sequence
  mRNA product Slc7a3_PpLuc(GC)_RPS9_A64-C30-histoneSL
gggagagggcgcuuggcuugcaaggacccugagcugcggcauugaagcacacccaacccaacucgacugaagucagccucacugaaccggaucugagaaucuucucucucugggcuugccagggcucuccgaaccuagcuagcauccucuucaauuccaacuagaaagcuuaccauggaggacgccaagaacaucaagaagggcccggcgcccuucuacccgcuggaggacgggaccgccggcgagcagcuccacaaggccaugaagcgguacgcccuggugccgggcacgaucgccuucaccgacgcccacaucgaggucgacaucaccuacgcggaguacuucgagaugagcgugcgccuggccgaggccaugaagcgguacggccugaacaccaaccaccggaucguggugugcucggagaacagccugcaguucuucaugccggugcugggcgcccucuucaucggcguggccgucgccccggcgaacgacaucuacaacgagcgggagcugcugaacagcauggggaucagccagccgaccgugguguucgugagcaagaagggccugcagaagauccugaacgugcagaagaagcugcccaucauccagaagaucaucaucauggacagcaagaccgacuaccagggcuuccagucgauguacacguucgugaccagccaccucccgccgggcuucaacgaguacgacuucgucccggagagcuucgaccgggacaagaccaucgcccugaucaugaacagcagcggcagcaccggccugccgaaggggguggcccugccgcaccggaccgccugcgugcgcuucucgcacgcccgggaccccaucuucggcaaccagaucaucccggacaccgccauccugagcguggugccguuccaccacggcuucggcauguucacgacccugggcuaccucaucugcggcuuccgggugguccugauguaccgguucgaggaggagcuguuccugcggagccugcaggacuacaagauccagagcgcgcugcucgugccgacccuguucagcuucuucgccaagagcacccugaucgacaaguacgaccugucgaaccugcacgagaucgccagcgggggcgccccgcugagcaaggaggugggcgaggccguggccaagcgguuccaccucccgggcauccgccagggcuacggccugaccgagaccacgagcgcgauccugaucacccccgagggggacgacaagccgggcgccgugggcaagguggucccguucuucgaggccaaggugguggaccuggacaccggcaagacccugggcgugaaccagcggggcgagcugugcgugcgggggccgaugaucaugagcggcuacgugaacaacccggaggccaccaacgcccucaucgacaaggacggcuggcugcacagcggcgacaucgccuacugggacgaggacgagcacuucuucaucgucgaccggcugaagucgcugaucaaguacaagggcuaccagguggcgccggccgagcuggagagcauccugcuccagcaccccaacaucuucgacgccggcguggccgggcugccggacgacgacgccggcgagcugccggccgcggugguggugcuggagcacggcaagaccaugacggagaaggagaucgucgacuacguggccagccaggugaccaccgccaagaagcugcggggcggcgugguguucguggacgaggucccgaagggccugaccgggaagcucgacgcccggaagauccgcgagauccugaucaaggccaagaagggcggcaagaucgccgugugaggacuaguguccaccugucccuccugggcugcuggauugucucguuuuccugccaaauaaacaggaucagcgcuuuacagaucuaaaaaaaaaaaaaaaaaaaaaaaaaaaaaaaaaaaaaaaaaaaaaaaaaaaaaaaaaaaaaaaaugcaucccccccccccccccccccccccccccccccaaaggcucuuuucagagccaccagaauu

SEQ ID NO: 353 - RNA, 1980 nt, Artificial Sequence
  mRNA product Slc7a3_PpLuc(GC)_RPS9_A64
gggagagggcgcuuggcuugcaaggacccugagcugcggcauugaagcacacccaacccaacucgacugaagucagccucacugaaccggaucugagaaucuucucucucugggcuugccagggcucuccgaaccuagcuagcauccucuucaauuccaacuagaaagcuuaccauggaggacgccaagaacaucaagaagggcccggcgcccuucuacccgcuggaggacgggaccgccggcgagcagcuccacaaggccaugaagcgguacgcccuggugccgggcacgaucgccuucaccgacgcccacaucgaggucgacaucaccuacgcggaguacuucgagaugagcgugcgccuggccgaggccaugaagcgguacggccugaacaccaaccaccggaucguggugugcucggagaacagccugcaguucuucaugccggugcugggcgcccucuucaucggcguggccgucgccccggcgaacgacaucuacaacgagcgggagcugcugaacagcauggggaucagccagccgaccgugguguucgugagcaagaagggccugcagaagauccugaacgugcagaagaagcugcccaucauccagaagaucaucaucauggacagcaagaccgacuaccagggcuuccagucgauguacacguucgugaccagccaccucccgccgggcuucaacgaguacgacuucgucccggagagcuucgaccgggacaagaccaucgcccugaucaugaacagcagcggcagcaccggccugccgaaggggguggcccugccgcaccggaccgccugcgugcgcuucucgcacgcccgggaccccaucuucggcaaccagaucaucccggacaccgccauccugagcguggugccguuccaccacggcuucggcauguucacgacccugggcuaccucaucugcggcuuccgggugguccugauguaccgguucgaggaggagcuguuccugcggagccugcaggacuacaagauccagagcgcgcugcucgugccgacccuguucagcuucuucgccaagagcacccugaucgacaaguacgaccugucgaaccugcacgagaucgccagcgggggcgccccgcugagcaaggaggugggcgaggccguggccaagcgguuccaccucccgggcauccgccagggcuacggccugaccgagaccacgagcgcgauccugaucacccccgagggggacgacaagccgggcgccgugggcaagguggucccguucuucgaggccaaggugguggaccuggacaccggcaagacccugggcgugaaccagcggggcgagcugugcgugcgggggccgaugaucaugagcggcuacgugaacaacccggaggccaccaacgcccucaucgacaaggacggcuggcugcacagcggcgacaucgccuacugggacgaggacgagcacuucuucaucgucgaccggcugaagucgcugaucaaguacaagggcuaccagguggcgccggccgagcuggagagcauccugcuccagcaccccaacaucuucgacgccggcguggccgggcugccggacgacgacgccggcgagcugccggccgcggugguggugcuggagcacggcaagaccaugacggagaaggagaucgucgacuacguggccagccaggugaccaccgccaagaagcugcggggcggcgugguguucguggacgaggucccgaagggccugaccgggaagcucgacgcccggaagauccgcgagauccugaucaaggccaagaagggcggcaagaucgccgugugaggacuaguguccaccugucccuccugggcugcuggauugucucguuuuccugccaaauaaacaggaucagcgcuuuacagaucuaaaaaaaaaaaaaaaaaaaaaaaaaaaaaaaaaaaaaaaaaaaaaaaaaaaaaaaaaaaaaaaagaauu

SEQ ID NO: 354 - RNA, 2048 nt, Artificial Sequence
  mRNA product Slc7a3_protein of interest example 5_RPS9_A64-C30-histoneSL
  misc_feature (175)..(1836): n is a, c, g, or u
gggagagggcgcuuggcuugcaaggacccugagcugcggcauugaagcacacccaacccaacucgacugaagucagccucacugaaccggaucugagaaucuucucucucugggcuugccagggcucuccgaaccuagcuagcauccucuucaauuccaacuagaaagcuuaccnnnnnnnnnnnnnnnnnnnnnnnnnnnnnnnnnnnnnnnnnnnnnnnnnnnnnnnnnnnnnnnnnnnnnnnnnnnnnnnnnnnnnnnnnnnnnnnnnnnnnnnnnnnnnnnnnnnnnnnnnnnnnnnnnnnnnnnnnnnnnnnnnnnnnnnnnnnnnnnnnnnnnnnnnnnnnnnnnnnnnnnnnnnnnnnnnnnnnnnnnnnnnnnnnnnnnnnnnnnnnnnnnnnnnnnnnnnnnnnnnnnnnnnnnnnnnnnnnnnnnnnnnnnnnnnnnnnnnnnnnnnnnnnnnnnnnnnnnnnnnnnnnnnnnnnnnnnnnnnnnnnnnnnnnnnnnnnnnnnnnnnnnnnnnnnnnnnnnnnnnnnnnnnnnnnnnnnnnnnnnnnnnnnnnnnnnnnnnnnnnnnnnnnnnnnnnnnnnnnnnnnnnnnnnnnnnnnnnnnnnnnnnnnnnnnnnnnnnnnnnnnnnnnnnnnnnnnnnnnnnnnnnnnnnnnnnnnnnnnnnnnnnnnnnnnnnnnnnnnnnnnnnnnnnnnnnnnnnnnnnnnnnnnnnnnnnnnnnnnnnnnnnnnnnnnnnnnnnnnnnnnnnnnnnnnnnnnnnnnnnnnnnnnnnnnnnnnnnnnnnnnnnnnnnnnnnnnnnnnnnnnnnnnnnnnnnnnnnnnnnnnnnnnnnnnnnnnnnnnnnnnnnnnnnnnnnnnnnnnnnnnnnnnnnnnnnnnnnnnnnnnnnnnnnnnnnnnnnnnnnnnnnnnnnnnnnnnnnnnnnnnnnnnnnnnnnnnnnnnnnnnnnnnnnnnnnnnnnnnnnnnnnnnnnnnnnnnnnnnnnnnnnnnnnnnnnnnnnnnnnnnnnnnnnnnnnnnnnnnnnnnnnnnnnnnnnnnnnnnnnnnnnnnnnnnnnnnnnnnnnnnnnnnnnnnnnnnnnnnnnnnnnnnnnnnnnnnnnnnnnnnnnnnnnnnnnnnnnnnnnnnnnnnnnnnnnnnnnnnnnnnnnnnnnnnnnnnnnnnnnnnnnnnnnnnnnnnnnnnnnnnnnnnnnnnnnnnnnnnnnnnnnnnnnnnnnnnnnnnnnnnnnnnnnnnnnnnnnnnnnnnnnnnnnnnnnnnnnnnnnnnnnnnnnnnnnnnnnnnnnnnnnnnnnnnnnnnnnnnnnnnnnnnnnnnnnnnnnnnnnnnnnnnnnnnnnnnnnnnnnnnnnnnnnnnnnnnnnnnnnnnnnnnnnnnnnnnnnnnnnnnnnnnnnnnnnnnnnnnnnnnnnnnnnnnnnnnnnnnnnnnnnnnnnnnnnnnnnnnnnnnnnnnnnnnnnnnnnnnnnnnnnnnnnnnnnnnnnnnnnnnnnnnnnnnnnnnnnnnnnnnnnnnnnnnnnnnnnnnnnnnnnnnnnnnnnnnnnnnnnnnnnnnnnnnnnnnnnnnnnnnnnnnnnnnnnnnnnnnnnnnnnnnnnnnnnnnnnnnnnnnnnnnnnnnnnnnnnnnnnnnnnnnnnnnnnnnnnnnnnnnnnnnnnnnnnnnnnnnnnnnnnnnnnnnnnnnnnnnnnnnnnnnnnnnnnnnnnnnnnnnnnnnnnnnnnnnnnnnnnnnnnnnnnnnnnnnnnnnnnnnnnnnnnnnnnnnnnnnnnnnnnnnnnnnnnnnnnnnnnnnnnnnnnnnnnnnnnnnnnnnnnnnnnnnnnnnnnnnnnnggacuaguguccaccugucccuccugggcugcuggauugucucguuuuccugccaaauaaacaggaucagcgcuuuacagaucuaaaaaaaaaaaaaaaaaaaaaaaaaaaaaaaaaaaaaaaaaaaaaaaaaaaaaaaaaaaaaaaaugcaucccccccccccccccccccccccccccccccaaaggcucuuuucagagccaccagaauu

SEQ ID NO: 355 - RNA, 1904 nt, Artificial Sequence
  mRNA product TUBB4B_RAV-G(GC)_RPS9_A64-C30-histoneSL
gggagaauauaagcguuggcggagcgucgguuguagcacucugcgcgcccgcucuucugcugcuguuugucuacuuccuccugcuuccccgccgccgccgccgccaucaagcuuaccauggugccccaggcccuccuguucgucccgcugcugguguucccccucugcuucggcaaguuccccaucuacaccauccccgacaagcuggggccguggagccccaucgacauccaccaccuguccugccccaacaaccucguggucgaggacgagggcugcaccaaccugagcggguucuccuacauggagcugaaggugggcuacaucagcgccaucaagaugaacggguucacgugcaccggcguggucaccgaggcggagaccuacacgaacuucgugggcuacgugaccaccaccuucaagcggaagcacuuccgccccacgccggacgccugccgggccgccuacaacuggaagauggccggggacccccgcuacgaggagucccuccacaaccccuaccccgacuaccacuggcugcggaccgucaagaccaccaaggagagccuggugaucaucuccccgagcguggcggaccucgaccccuacgaccgcucccugcacagccgggucuuccccggcgggaacugcuccggcguggccgugagcuccacguacugcagcaccaaccacgacuacaccaucuggaugcccgagaacccgcgccuggggauguccugcgacaucuucaccaacagccggggcaagcgcgccuccaagggcagcgagacgugcggguucgucgacgagcggggccucuacaagucccugaagggggccugcaagcugaagcucugcggcgugcugggccugcgccucauggacgggaccuggguggcgaugcagaccagcaacgagaccaaguggugcccccccggccagcuggucaaccugcacgacuuccggagcgacgagaucgagcaccucgugguggaggagcuggucaagaagcgcgaggagugccuggacgcccucgaguccaucaugacgaccaagagcguguccuuccggcgccugagccaccuccggaagcuggugcccggguucggcaaggccuacaccaucuucaacaagacccugauggaggccgacgcccacuacaaguccguccgcacguggaacgagaucaucccgagcaaggggugccugcgggugggcggccgcugccacccccacgucaacgggguguucuucaacggcaucauccucgggcccgacggcaacgugcugauccccgagaugcaguccagccugcuccagcagcacauggagcugcuggucuccagcgugaucccgcucaugcacccccuggcggaccccuccaccguguucaagaacggggacgaggccgaggacuucgucgaggugcaccuccccgacgugcacgagcggaucagcggcgucgaccugggccugccgaacugggggaaguacgugcugcucuccgccggcgcccugaccgcccugaugcugaucaucuuccucaugaccugcuggcgccgggugaaccggagcgagcccacgcagcacaaccugcgcgggaccggccgggaggucuccgugaccccgcagagcgggaagaucaucuccagcugggaguccuacaagagcggcggcgagaccgggcugugaggacuaguguccaccugucccuccugggcugcuggauugucucguuuuccugccaaauaaacaggaucagcgcuuuacagaucuaaaaaaaaaaaaaaaaaaaaaaaaaaaaaaaaaaaaaaaaaaaaaaaaaaaaaaaaaaaaaaaaugcaucccccccccccccccccccccccccccccccaaaggcucuuuucagagccaccagaauu

SEQ ID NO: 356 - RNA, 1845 nt, Artificial Sequence
  mRNA product TUBB4B_RAV-G(GC)_RPS9_A64
gggagaauauaagcguuggcggagcgucgguuguagcacucugcgcgcccgcucuucugcugcuguuugucuacuuccuccugcuuccccgccgccgccgccgccaucaagcuuaccauggugccccaggcccuccuguucgucccgcugcugguguucccccucugcuucggcaaguuccccaucuacaccauccccgacaagcuggggccguggagccccaucgacauccaccaccuguccugccccaacaaccucguggucgaggacgagggcugcaccaaccugagcggguucuccuacauggagcugaaggugggcuacaucagcgccaucaagaugaacggguucacgugcaccggcguggucaccgaggcggagaccuacacgaacuucgugggcuacgugaccaccaccuucaagcggaagcacuuccgccccacgccggacgccugccgggccgccuacaacuggaagauggccggggacccccgcuacgaggagucccuccacaaccccuaccccgacuaccacuggcugcggaccgucaagaccaccaaggagagccuggugaucaucuccccgagcguggcggaccucgaccccuacgaccgcucccugcacagccgggucuuccccggcgggaacugcuccggcguggccgugagcuccacguacugcagcaccaaccacgacuacaccaucuggaugcccgagaacccgcgccuggggauguccugcgacaucuucaccaacagccggggcaagcgcgccuccaagggcagcgagacgugcggguucgucgacgagcggggccucuacaagucccugaagggggccugcaagcugaagcucugcggcgugcugggccugcgccucauggacgggaccuggguggcgaugcagaccagcaacgagaccaaguggugcccccccggccagcuggucaaccugcacgacuuccggagcgacgagaucgagcaccucgugguggaggagcuggucaagaagcgcgaggagugccuggacgcccucgaguccaucaugacgaccaagagcguguccuuccggcgccugagccaccuccggaagcuggugcccggguucggcaaggccuacaccaucuucaacaagacccugauggaggccgacgcccacuacaaguccguccgcacguggaacgagaucaucccgagcaaggggugccugcgggugggcggccgcugccacccccacgucaacgggguguucuucaacggcaucauccucgggcccgacggcaacgugcugauccccgagaugcaguccagccugcuccagcagcacauggagcugcuggucuccagcgugaucccgcucaugcacccccuggcggaccccuccaccguguucaagaacggggacgaggccgaggacuucgucgaggugcaccuccccgacgugcacgagcggaucagcggcgucgaccugggccugccgaacugggggaaguacgugcugcucuccgccggcgcccugaccgcccugaugcugaucaucuuccucaugaccugcuggcgccgggugaaccggagcgagcccacgcagcacaaccugcgcgggaccggccgggaggucuccgugaccccgcagagcgggaagaucaucuccagcugggaguccuacaagagcggcggcgagaccgggcugugaggacuaguguccaccugucccuccugggcugcuggauugucucguuuuccugccaaauaaacaggaucagcgcuuuacagaucuaaaaaaaaaaaaaaaaaaaaaaaaaaaaaaaaaaaaaaaaaaaaaaaaaaaaaaaaaaaaaaaagaauu

SEQ ID NO: 357 - RNA, 911 nt, Artificial Sequence
  mRNA product TUBB4B_HsEPO(GC)_RPS9_A64-C30-histoneSL
gggagaauauaagcguuggcggagcgucgguuguagcacucugcgcgcccgcucuucugcugcuguuugucuacuuccuccugcuuccccgccgccgccgccgccaucaagcuuaccaugggcgugcacgagugccccgccuggcuguggcuccugcugagccuccugucccugccgcucgggcugcccguccugggcgcccccccgcggcucaucugcgacagccgcgugcuggagcgguaccugcucgaggcgaaggaggccgagaacaucaccaccgggugcgccgagcacugcucccugaacgagaacaucacggugccggacaccaaggucaacuucuacgccuggaagcgcauggaggugggccagcaggccguggaggucuggcaggggcuggcgcuccugagcgaggccgugcugcggggccaggcccuccuggugaacuccagccagcccugggagccccugcagcuccacgucgacaaggccguguccggccugcgcagccugaccacccuccugcgggcgcugggggcccagaaggaggccaucucccccccggacgccgccagcgcggccccgcuccgcacgaucaccgccgacaccuuccggaagcuguuccgcguguacuccaacuuccugcggggcaagcucaagcuguacaccggggaggccugccgcacgggcgaccggugaggacuaguguccaccugucccuccugggcugcuggauugucucguuuuccugccaaauaaacaggaucagcgcuuuacagaucuaaaaaaaaaaaaaaaaaaaaaaaaaaaaaaaaaaaaaaaaaaaaaaaaaaaaaaaaaaaaaaaaugcaucccccccccccccccccccccccccccccccaaaggcucuuuucagagccaccagaauu

SEQ ID NO: 358 - RNA, 852 nt, Artificial Sequence
  mRNA product TUBB4B_HsEPO(GC)_RPS9_A64
gggagaauauaagcguuggcggagcgucgguuguagcacucugcgcgcccgcucuucugcugcuguuugucuacuuccuccugcuuccccgccgccgccgccgccaucaagcuuaccaugggcgugcacgagugccccgccuggcuguggcuccugcugagccuccugucccugccgcucgggcugcccguccugggcgcccccccgcggcucaucugcgacagccgcgugcuggagcgguaccugcucgaggcgaaggaggccgagaacaucaccaccgggugcgccgagcacugcucccugaacgagaacaucacggugccggacaccaaggucaacuucuacgccuggaagcgcauggaggugggccagcaggccguggaggucuggcaggggcuggcgcuccugagcgaggccgugcugcggggccaggcccuccuggugaacuccagccagcccugggagccccugcagcuccacgucgacaaggccguguccggccugcgcagccugaccacccuccugcgggcgcugggggcccagaaggaggccaucucccccccggacgccgccagcgcggccccgcuccgcacgaucaccgccgacaccuuccggaagcuguuccgcguguacuccaacuuccugcggggcaagcucaagcuguacaccggggaggccugccgcacgggcgaccggugaggacuaguguccaccugucccuccugggcugcuggauugucucguuuuccugccaaauaaacaggaucagcgcuuuacagaucuaaaaaaaaaaaaaaaaaaaaaaaaaaaaaaaaaaaaaaaaaaaaaaaaaaaaaaaaaaaaaaaagaauu

SEQ ID NO: 359 - RNA, 1982 nt, Artificial Sequence
  mRNA product TUBB4B_PpLuc(GC)_RPS9_A64-C30-histoneSL
gggagaauauaagcguuggcggagcgucgguuguagcacucugcgcgcccgcucuucugcugcuguuugucuacuuccuccugcuuccccgccgccgccgccgccaucaagcuuaccauggaggacgccaagaacaucaagaagggcccggcgcccuucuacccgcuggaggacgggaccgccggcgagcagcuccacaaggccaugaagcgguacgcccuggugccgggcacgaucgccuucaccgacgcccacaucgaggucgacaucaccuacgcggaguacuucgagaugagcgugcgccuggccgaggccaugaagcgguacggccugaacaccaaccaccggaucguggugugcucggagaacagccugcaguucuucaugccggugcugggcgcccucuucaucggcguggccgucgccccggcgaacgacaucuacaacgagcgggagcugcugaacagcauggggaucagccagccgaccgugguguucgugagcaagaagggccugcagaagauccugaacgugcagaagaagcugcccaucauccagaagaucaucaucauggacagcaagaccgacuaccagggcuuccagucgauguacacguucgugaccagccaccucccgccgggcuucaacgaguacgacuucgucccggagagcuucgaccgggacaagaccaucgcccugaucaugaacagcagcggcagcaccggccugccgaaggggguggcccugccgcaccggaccgccugcgugcgcuucucgcacgcccgggaccccaucuucggcaaccagaucaucccggacaccgccauccugagcguggugccguuccaccacggcuucggcauguucacgacccugggcuaccucaucugcggcuuccgggugguccugauguaccgguucgaggaggagcuguuccugcggagccugcaggacuacaagauccagagcgcgcugcucgugccgacccuguucagcuucuucgccaagagcacccugaucgacaaguacgaccugucgaaccugcacgagaucgccagcgggggcgccccgcugagcaaggaggugggcgaggccguggccaagcgguuccaccucccgggcauccgccagggcuacggccugaccgagaccacgagcgcgauccugaucacccccgagggggacgacaagccgggcgccgugggcaagguggucccguucuucgaggccaaggugguggaccuggacaccggcaagacccugggcgugaaccagcggggcgagcugugcgugcgggggccgaugaucaugagcggcuacgugaacaacccggaggccaccaacgcccucaucgacaaggacggcuggcugcacagcggcgacaucgccuacugggacgaggacgagcacuucuucaucgucgaccggcugaagucgcugaucaaguacaagggcuaccagguggcgccggccgagcuggagagcauccugcuccagcaccccaacaucuucgacgccggcguggccgggcugccggacgacgacgccggcgagcugccggccgcggugguggugcuggagcacggcaagaccaugacggagaaggagaucgucgacuacguggccagccaggugaccaccgccaagaagcugcggggcggcgugguguucguggacgaggucccgaagggccugaccgggaagcucgacgcccggaagauccgcgagauccugaucaaggccaagaagggcggcaagaucgccgugugaggacuaguguccaccugucccuccugggcugcuggauugucucguuuuccugccaaauaaacaggaucagcgcuuuacagaucuaaaaaaaaaaaaaaaaaaaaaaaaaaaaaaaaaaaaaaaaaaaaaaaaaaaaaaaaaaaaaaaaugcaucccccccccccccccccccccccccccccccaaaggcucuuuucagagccaccagaauu

SEQ ID NO: 360 - RNA, 1923 nt, Artificial Sequence
  mRNA product TUBB4B_PpLuc(GC)_RPS9_A64
gggagaauauaagcguuggcggagcgucgguuguagcacucugcgcgcccgcucuucugcugcuguuugucuacuuccuccugcuuccccgccgccgccgccgccaucaagcuuaccauggaggacgccaagaacaucaagaagggcccggcgcccuucuacccgcuggaggacgggaccgccggcgagcagcuccacaaggccaugaagcgguacgcccuggugccgggcacgaucgccuucaccgacgcccacaucgaggucgacaucaccuacgcggaguacuucgagaugagcgugcgccuggccgaggccaugaagcgguacggccugaacaccaaccaccggaucguggugugcucggagaacagccugcaguucuucaugccggugcugggcgcccucuucaucggcguggccgucgccccggcgaacgacaucuacaacgagcgggagcugcugaacagcauggggaucagccagccgaccgugguguucgugagcaagaagggccugcagaagauccugaacgugcagaagaagcugcccaucauccagaagaucaucaucauggacagcaagaccgacuaccagggcuuccagucgauguacacguucgugaccagccaccucccgccgggcuucaacgaguacgacuucgucccggagagcuucgaccgggacaagaccaucgcccugaucaugaacagcagcggcagcaccggccugccgaaggggguggcccugccgcaccggaccgccugcgugcgcuucucgcacgcccgggaccccaucuucggcaaccagaucaucccggacaccgccauccugagcguggugccguuccaccacggcuucggcauguucacgacccugggcuaccucaucugcggcuuccgggugguccugauguaccgguucgaggaggagcuguuccugcggagccugcaggacuacaagauccagagcgcgcugcucgugccgacccuguucagcuucuucgccaagagcacccugaucgacaaguacgaccugucgaaccugcacgagaucgccagcgggggcgccccgcugagcaaggaggugggcgaggccguggccaagcgguuccaccucccgggcauccgccagggcuacggccugaccgagaccacgagcgcgauccugaucacccccgagggggacgacaagccgggcgccgugggcaagguggucccguucuucgaggccaaggugguggaccuggacaccggcaagacccugggcgugaaccagcggggcgagcugugcgugcgggggccgaugaucaugagcggcuacgugaacaacccggaggccaccaacgcccucaucgacaaggacggcuggcugcacagcggcgacaucgccuacugggacgaggacgagcacuucuucaucgucgaccggcugaagucgcugaucaaguacaagggcuaccagguggcgccggccgagcuggagagcauccugcuccagcaccccaacaucuucgacgccggcguggccgggcugccggacgacgacgccggcgagcugccggccgcggugguggugcuggagcacggcaagaccaugacggagaaggagaucgucgacuacguggccagccaggugaccaccgccaagaagcugcggggcggcgugguguucguggacgaggucccgaagggccugaccgggaagcucgacgcccggaagauccgcgagauccugaucaaggccaagaagggcggcaagaucgccgugugaggacuaguguccaccugucccuccugggcugcuggauugucucguuuuccugccaaauaaacaggaucagcgcuuuacagaucuaaaaaaaaaaaaaaaaaaaaaaaaaaaaaaaaaaaaaaaaaaaaaaaaaaaaaaaaaaaaaaaagaauu

SEQ ID NO: 361 - RNA, 1991 nt, Artificial Sequence
  mRNA product TUBB4B_protein of interest example 5_RPS9_A64-C30-histoneSL
  misc_feature (118)..(1779): n is a, c, g, or u
gggagaauauaagcguuggcggagcgucgguuguagcacucugcgcgcccgcucuucugcugcuguuugucuacuuccuccugcuuccccgccgccgccgccgccaucaagcuuaccnnnnnnnnnnnnnnnnnnnnnnnnnnnnnnnnnnnnnnnnnnnnnnnnnnnnnnnnnnnnnnnnnnnnnnnnnnnnnnnnnnnnnnnnnnnnnnnnnnnnnnnnnnnnnnnnnnnnnnnnnnnnnnnnnnnnnnnnnnnnnnnnnnnnnnnnnnnnnnnnnnnnnnnnnnnnnnnnnnnnnnnnnnnnnnnnnnnnnnnnnnnnnnnnnnnnnnnnnnnnnnnnnnnnnnnnnnnnnnnnnnnnnnnnnnnnnnnnnnnnnnnnnnnnnnnnnnnnnnnnnnnnnnnnnnnnnnnnnnnnnnnnnnnnnnnnnnnnnnnnnnnnnnnnnnnnnnnnnnnnnnnnnnnnnnnnnnnnnnnnnnnnnnnnnnnnnnnnnnnnnnnnnnnnnnnnnnnnnnnnnnnnnnnnnnnnnnnnnnnnnnnnnnnnnnnnnnnnnnnnnnnnnnnnnnnnnnnnnnnnnnnnnnnnnnnnnnnnnnnnnnnnnnnnnnnnnnnnnnnnnnnnnnnnnnnnnnnnnnnnnnnnnnnnnnnnnnnnnnnnnnnnnnnnnnnnnnnnnnnnnnnnnnnnnnnnnnnnnnnnnnnnnnnnnnnnnnnnnnnnnnnnnnnnnnnnnnnnnnnnnnnnnnnnnnnnnnnnnnnnnnnnnnnnnnnnnnnnnnnnnnnnnnnnnnnnnnnnnnnnnnnnnnnnnnnnnnnnnnnnnnnnnnnnnnnnnnnnnnnnnnnnnnnnnnnnnnnnnnnnnnnnnnnnnnnnnnnnnnnnnnnnnnnnnnnnnnnnnnnnnnnnnnnnnnnnnnnnnnnnnnnnnnnnnnnnnnnnnnnnnnnnnnnnnnnnnnnnnnnnnnnnnnnnnnnnnnnnnnnnnnnnnnnnnnnnnnnnnnnnnnnnnnnnnnnnnnnnnnnnnnnnnnnnnnnnnnnnnnnnnnnnnnnnnnnnnnnnnnnnnnnnnnnnnnnnnnnnnnnnnnnnnnnnnnnnnnnnnnnnnnnnnnnnnnnnnnnnnnnnnnnnnnnnnnnnnnnnnnnnnnnnnnnnnnnnnnnnnnnnnnnnnnnnnnnnnnnnnnnnnnnnnnnnnnnnnnnnnnnnnnnnnnnnnnnnnnnnnnnnnnnnnnnnnnnnnnnnnnnnnnnnnnnnnnnnnnnnnnnnnnnnnnnnnnnnnnnnnnnnnnnnnnnnnnnnnnnnnnnnnnnnnnnnnnnnnnnnnnnnnnnnnnnnnnnnnnnnnnnnnnnnnnnnnnnnnnnnnnnnnnnnnnnnnnnnnnnnnnnnnnnnnnnnnnnnnnnnnnnnnnnnnnnnnnnnnnnnnnnnnnnnnnnnnnnnnnnnnnnnnnnnnnnnnnnnnnnnnnnnnnnnnnnnnnnnnnnnnnnnnnnnnnnnnnnnnnnnnnnnnnnnnnnnnnnnnnnnnnnnnnnnnnnnnnnnnnnnnnnnnnnnnnnnnnnnnnnnnnnnnnnnnnnnnnnnnnnnnnnnnnnnnnnnnnnnnnnnnnnnnnnnnnnnnnnnnnnnnnnnnnnnnnnnnnnnnnnnnnnnnnnnnnnnnnnnnnnnnnnnnnnnnnnnnnnnnnnnnnnnnnnnnnnnnnnnnnnnnnnnnnnnnnnnnnnnnnnnnnnnnnnnnnnnnnnnnnnnnnnnnnnnnnnnnnnnnnnnnnnnnnnnnnnnnnnnnnnnnnnnnnggacuaguguccaccugucccuccugggcugcuggauugucucguuuuccugccaaauaaacaggaucagcgcuuuacagaucuaaaaaaaaaaaaaaaaaaaaaaaaaaaaaaaaaaaaaaaaaaaaaaaaaaaaaaaaaaaaaaaaugcaucccccccccccccccccccccccccccccccaaaggcucuuuucagagccaccagaauu

SEQ ID NO: 362 - RNA, 2024 nt, Artificial Sequence
  mRNA product Ubqln2_RAV-G(GC)_RPS9_A64-C30-histoneSL
gggagacggagacggccugcaggaccugcucucucagcccucagccgaggccuacgccgagccgagugcgcagccgacgaccgggaggagccgcagccuucaacucugagguacugugauccgcgcugcccgccgggccgccccaguccgcugcugcggcaccuccuucccucgcgcccucuucgcucgccagcgccuucccugugagccugcgucaccgcggccgccaagcuuaccauggugccccaggcccuccuguucgucccgcugcugguguucccccucugcuucggcaaguuccccaucuacaccauccccgacaagcuggggccguggagccccaucgacauccaccaccuguccugccccaacaaccucguggucgaggacgagggcugcaccaaccugagcggguucuccuacauggagcugaaggugggcuacaucagcgccaucaagaugaacggguucacgugcaccggcguggucaccgaggcggagaccuacacgaacuucgugggcuacgugaccaccaccuucaagcggaagcacuuccgccccacgccggacgccugccgggccgccuacaacuggaagauggccggggacccccgcuacgaggagucccuccacaaccccuaccccgacuaccacuggcugcggaccgucaagaccaccaaggagagccuggugaucaucuccccgagcguggcggaccucgaccccuacgaccgcucccugcacagccgggucuuccccggcgggaacugcuccggcguggccgugagcuccacguacugcagcaccaaccacgacuacaccaucuggaugcccgagaacccgcgccuggggauguccugcgacaucuucaccaacagccggggcaagcgcgccuccaagggcagcgagacgugcggguucgucgacgagcggggccucuacaagucccugaagggggccugcaagcugaagcucugcggcgugcugggccugcgccucauggacgggaccuggguggcgaugcagaccagcaacgagaccaaguggugcccccccggccagcuggucaaccugcacgacuuccggagcgacgagaucgagcaccucgugguggaggagcuggucaagaagcgcgaggagugccuggacgcccucgaguccaucaugacgaccaagagcguguccuuccggcgccugagccaccuccggaagcuggugcccggguucggcaaggccuacaccaucuucaacaagacccugauggaggccgacgcccacuacaaguccguccgcacguggaacgagaucaucccgagcaaggggugccugcgggugggcggccgcugccacccccacgucaacgggguguucuucaacggcaucauccucgggcccgacggcaacgugcugauccccgagaugcaguccagccugcuccagcagcacauggagcugcuggucuccagcgugaucccgcucaugcacccccuggcggaccccuccaccguguucaagaacggggacgaggccgaggacuucgucgaggugcaccuccccgacgugcacgagcggaucagcggcgucgaccugggccugccgaacugggggaaguacgugcugcucuccgccggcgcccugaccgcccugaugcugaucaucuuccucaugaccugcuggcgccgggugaaccggagcgagcccacgcagcacaaccugcgcgggaccggccgggaggucuccgugaccccgcagagcgggaagaucaucuccagcugggaguccuacaagagcggcggcgagaccgggcugugaggacuaguguccaccugucccuccugggcugcuggauugucucguuuuccugccaaauaaacaggaucagcgcuuuacagaucuaaaaaaaaaaaaaaaaaaaaaaaaaaaaaaaaaaaaaaaaaaaaaaaaaaaaaaaaaaaaaaaaugcaucccccccccccccccccccccccccccccccaaaggcucuuuucagagccaccagaauu

SEQ ID NO: 363 - RNA, 1965 nt, Artificial Sequence
  mRNA product Ubqln2_RAV-G(GC)_RPS9_A64
gggagacggagacggccugcaggaccugcucucucagcccucagccgaggccuacgccgagccgagugcgcagccgacgaccgggaggagccgcagccuucaacucugagguacugugauccgcgcugcccgccgggccgccccaguccgcugcugcggcaccuccuucccucgcgcccucuucgcucgccagcgccuucccugugagccugcgucaccgcggccgccaagcuuaccauggugccccaggcccuccuguucgucccgcugcugguguucccccucugcuucggcaaguuccccaucuacaccauccccgacaagcuggggccguggagccccaucgacauccaccaccuguccugccccaacaaccucguggucgaggacgagggcugcaccaaccugagcggguucuccuacauggagcugaaggugggcuacaucagcgccaucaagaugaacggguucacgugcaccggcguggucaccgaggcggagaccuacacgaacuucgugggcuacgugaccaccaccuucaagcggaagcacuuccgccccacgccggacgccugccgggccgccuacaacuggaagauggccggggacccccgcuacgaggagucccuccacaaccccuaccccgacuaccacuggcugcggaccgucaagaccaccaaggagagccuggugaucaucuccccgagcguggcggaccucgaccccuacgaccgcucccugcacagccgggucuuccccggcgggaacugcuccggcguggccgugagcuccacguacugcagcaccaaccacgacuacaccaucuggaugcccgagaacccgcgccuggggauguccugcgacaucuucaccaacagccggggcaagcgcgccuccaagggcagcgagacgugcggguucgucgacgagcggggccucuacaagucccugaagggggccugcaagcugaagcucugcggcgugcugggccugcgccucauggacgggaccuggguggcgaugcagaccagcaacgagaccaaguggugcccccccggccagcuggucaaccugcacgacuuccggagcgacgagaucgagcaccucgugguggaggagcuggucaagaagcgcgaggagugccuggacgcccucgaguccaucaugacgaccaagagcguguccuuccggcgccugagccaccuccggaagcuggugcccggguucggcaaggccuacaccaucuucaacaagacccugauggaggccgacgcccacuacaaguccguccgcacguggaacgagaucaucccgagcaaggggugccugcgggugggcggccgcugccacccccacgucaacgggguguucuucaacggcaucauccucgggcccgacggcaacgugcugauccccgagaugcaguccagccugcuccagcagcacauggagcugcuggucuccagcgugaucccgcucaugcacccccuggcggaccccuccaccguguucaagaacggggacgaggccgaggacuucgucgaggugcaccuccccgacgugcacgagcggaucagcggcgucgaccugggccugccgaacugggggaaguacgugcugcucuccgccggcgcccugaccgcccugaugcugaucaucuuccucaugaccugcuggcgccgggugaaccggagcgagcccacgcagcacaaccugcgcgggaccggccgggaggucuccgugaccccgcagagcgggaagaucaucuccagcugggaguccuacaagagcggcggcgagaccgggcugugaggacuaguguccaccugucccuccugggcugcuggauugucucguuuuccugccaaauaaacaggaucagcgcuuuacagaucuaaaaaaaaaaaaaaaaaaaaaaaaaaaaaaaaaaaaaaaaaaaaaaaaaaaaaaaaaaaaaaaagaauu

SEQ ID NO: 364 - RNA, 1031 nt, Artificial Sequence
  mRNA product Ubqln2_HsEPO(GC)_RPS9_A64-C30-histoneSL
gggagacggagacggccugcaggaccugcucucucagcccucagccgaggccuacgccgagccgagugcgcagccgacgaccgggaggagccgcagccuucaacucugagguacugugauccgcgcugcccgccgggccgccccaguccgcugcugcggcaccuccuucccucgcgcccucuucgcucgccagcgccuucccugugagccugcgucaccgcggccgccaagcuuaccaugggcgugcacgagugccccgccuggcuguggcuccugcugagccuccugucccugccgcucgggcugcccguccugggcgcccccccgcggcucaucugcgacagccgcgugcuggagcgguaccugcucgaggcgaaggaggccgagaacaucaccaccgggugcgccgagcacugcucccugaacgagaacaucacggugccggacaccaaggucaacuucuacgccuggaagcgcauggaggugggccagcaggccguggaggucuggcaggggcuggcgcuccugagcgaggccgugcugcggggccaggcccuccuggugaacuccagccagcccugggagccccugcagcuccacgucgacaaggccguguccggccugcgcagccugaccacccuccugcgggcgcugggggcccagaaggaggccaucucccccccggacgccgccagcgcggccccgcuccgcacgaucaccgccgacaccuuccggaagcuguuccgcguguacuccaacuuccugcggggcaagcucaagcuguacaccggggaggccugccgcacgggcgaccggugaggacuaguguccaccugucccuccugggcugcuggauugucucguuuuccugccaaauaaacaggaucagcgcuuuacagaucuaaaaaaaaaaaaaaaaaaaaaaaaaaaaaaaaaaaaaaaaaaaaaaaaaaaaaaaaaaaaaaaaugcaucccccccccccccccccccccccccccccccaaaggcucuuuucagagccaccagaauu

SEQ ID NO: 365 - RNA, 972 nt, Artificial Sequence
  mRNA product Ubqln2_HsEPO(GC)_RPS9_A64
gggagacggagacggccugcaggaccugcucucucagcccucagccgaggccuacgccgagccgagugcgcagccgacgaccgggaggagccgcagccuucaacucugagguacugugauccgcgcugcccgccgggccgccccaguccgcugcugcggcaccuccuucccucgcgcccucuucgcucgccagcgccuucccugugagccugcgucaccgcggccgccaagcuuaccaugggcgugcacgagugccccgccuggcuguggcuccugcugagccuccugucccugccgcucgggcugcccguccugggcgcccccccgcggcucaucugcgacagccgcgugcuggagcgguaccugcucgaggcgaaggaggccgagaacaucaccaccgggugcgccgagcacugcucccugaacgagaacaucacggugccggacaccaaggucaacuucuacgccuggaagcgcauggaggugggccagcaggccguggaggucuggcaggggcuggcgcuccugagcgaggccgugcugcggggccaggcccuccuggugaacuccagccagcccugggagccccugcagcuccacgucgacaaggccguguccggccugcgcagccugaccacccuccugcgggcgcugggggcccagaaggaggccaucucccccccggacgccgccagcgcggccccgcuccgcacgaucaccgccgacaccuuccggaagcuguuccgcguguacuccaacuuccugcggggcaagcucaagcuguacaccggggaggccugccgcacgggcgaccggugaggacuaguguccaccugucccuccugggcugcuggauugucucguuuuccugccaaauaaacaggaucagcgcuuuacagaucuaaaaaaaaaaaaaaaaaaaaaaaaaaaaaaaaaaaaaaaaaaaaaaaaaaaaaaaaaaaaaaaagaauu

SEQ ID NO: 366 - RNA, 2102 nt, Artificial Sequence
  mRNA product Ubqln2_PpLuc(GC)_RPS9_A64-C30-histoneSL
gggagacggagacggccugcaggaccugcucucucagcccucagccgaggccuacgccgagccgagugcgcagccgacgaccgggaggagccgcagccuucaacucugagguacugugauccgcgcugcccgccgggccgccccaguccgcugcugcggcaccuccuucccucgcgcccucuucgcucgccagcgccuucccugugagccugcgucaccgcggccgccaagcuuaccauggaggacgccaagaacaucaagaagggcccggcgcccuucuacccgcuggaggacgggaccgccggcgagcagcuccacaaggccaugaagcgguacgcccuggugccgggcacgaucgccuucaccgacgcccacaucgaggucgacaucaccuacgcggaguacuucgagaugagcgugcgccuggccgaggccaugaagcgguacggccugaacaccaaccaccggaucguggugugcucggagaacagccugcaguucuucaugccggugcugggcgcccucuucaucggcguggccgucgccccggcgaacgacaucuacaacgagcgggagcugcugaacagcauggggaucagccagccgaccgugguguucgugagcaagaagggccugcagaagauccugaacgugcagaagaagcugcccaucauccagaagaucaucaucauggacagcaagaccgacuaccagggcuuccagucgauguacacguucgugaccagccaccucccgccgggcuucaacgaguacgacuucgucccggagagcuucgaccgggacaagaccaucgcccugaucaugaacagcagcggcagcaccggccugccgaaggggguggcccugccgcaccggaccgccugcgugcgcuucucgcacgcccgggaccccaucuucggcaaccagaucaucccggacaccgccauccugagcguggugccguuccaccacggcuucggcauguucacgacccugggcuaccucaucugcggcuuccgggugguccugauguaccgguucgaggaggagcuguuccugcggagccugcaggacuacaagauccagagcgcgcugcucgugccgacccuguucagcuucuucgccaagagcacccugaucgacaaguacgaccugucgaaccugcacgagaucgccagcgggggcgccccgcugagcaaggaggugggcgaggccguggccaagcgguuccaccucccgggcauccgccagggcuacggccugaccgagaccacgagcgcgauccugaucacccccgagggggacgacaagccgggcgccgugggcaagguggucccguucuucgaggccaaggugguggaccuggacaccggcaagacccugggcgugaaccagcggggcgagcugugcgugcgggggccgaugaucaugagcggcuacgugaacaacccggaggccaccaacgcccucaucgacaaggacggcuggcugcacagcggcgacaucgccuacugggacgaggacgagcacuucuucaucgucgaccggcugaagucgcugaucaaguacaagggcuaccagguggcgccggccgagcuggagagcauccugcuccagcaccccaacaucuucgacgccggcguggccgggcugccggacgacgacgccggcgagcugccggccgcggugguggugcuggagcacggcaagaccaugacggagaaggagaucgucgacuacguggccagccaggugaccaccgccaagaagcugcggggcggcgugguguucguggacgaggucccgaagggccugaccgggaagcucgacgcccggaagauccgcgagauccugaucaaggccaagaagggcggcaagaucgccgugugaggacuaguguccaccugucccuccugggcugcuggauugucucguuuuccugccaaauaaacaggaucagcgcuuuacagaucuaaaaaaaaaaaaaaaaaaaaaaaaaaaaaaaaaaaaaaaaaaaaaaaaaaaaaaaaaaaaaaaaugcaucccccccccccccccccccccccccccccccaaaggcucuuuucagagccaccagaauu

SEQ ID NO: 367 - RNA, 2043 nt, Artificial Sequence
  mRNA product Ubqln2_PpLuc(GC)_RPS9_A64
gggagacggagacggccugcaggaccugcucucucagcccucagccgaggccuacgccgagccgagugcgcagccgacgaccgggaggagccgcagccuucaacucugagguacugugauccgcgcugcccgccgggccgccccaguccgcugcugcggcaccuccuucccucgcgcccucuucgcucgccagcgccuucccugugagccugcgucaccgcggccgccaagcuuaccauggaggacgccaagaacaucaagaagggcccggcgcccuucuacccgcuggaggacgggaccgccggcgagcagcuccacaaggccaugaagcgguacgcccuggugccgggcacgaucgccuucaccgacgcccacaucgaggucgacaucaccuacgcggaguacuucgagaugagcgugcgccuggccgaggccaugaagcgguacggccugaacaccaaccaccggaucguggugugcucggagaacagccugcaguucuucaugccggugcugggcgcccucuucaucggcguggccgucgccccggcgaacgacaucuacaacgagcgggagcugcugaacagcauggggaucagccagccgaccgugguguucgugagcaagaagggccugcagaagauccugaacgugcagaagaagcugcccaucauccagaagaucaucaucauggacagcaagaccgacuaccagggcuuccagucgauguacacguucgugaccagccaccucccgccgggcuucaacgaguacgacuucgucccggagagcuucgaccgggacaagaccaucgcccugaucaugaacagcagcggcagcaccggccugccgaaggggguggcccugccgcaccggaccgccugcgugcgcuucucgcacgcccgggaccccaucuucggcaaccagaucaucccggacaccgccauccugagcguggugccguuccaccacggcuucggcauguucacgacccugggcuaccucaucugcggcuuccgggugguccugauguaccgguucgaggaggagcuguuccugcggagccugcaggacuacaagauccagagcgcgcugcucgugccgacccuguucagcuucuucgccaagagcacccugaucgacaaguacgaccugucgaaccugcacgagaucgccagcgggggcgccccgcugagcaaggaggugggcgaggccguggccaagcgguuccaccucccgggcauccgccagggcuacggccugaccgagaccacgagcgcgauccugaucacccccgagggggacgacaagccgggcgccgugggcaagguggucccguucuucgaggccaaggugguggaccuggacaccggcaagacccugggcgugaaccagcggggcgagcugugcgugcgggggccgaugaucaugagcggcuacgugaacaacccggaggccaccaacgcccucaucgacaaggacggcuggcugcacagcggcgacaucgccuacugggacgaggacgagcacuucuucaucgucgaccggcugaagucgcugaucaaguacaagggcuaccagguggcgccggccgagcuggagagcauccugcuccagcaccccaacaucuucgacgccggcguggccgggcugccggacgacgacgccggcgagcugccggccgcggugguggugcuggagcacggcaagaccaugacggagaaggagaucgucgacuacguggccagccaggugaccaccgccaagaagcugcggggcggcgugguguucguggacgaggucccgaagggccugaccgggaagcucgacgcccggaagauccgcgagauccugaucaaggccaagaagggcggcaagaucgccgugugaggacuaguguccaccugucccuccugggcugcuggauugucucguuuuccugccaaauaaacaggaucagcgcuuuacagaucuaaaaaaaaaaaaaaaaaaaaaaaaaaaaaaaaaaaaaaaaaaaaaaaaaaaaaaaaaaaaaaaagaauu

SEQ ID NO: 368 - RNA, 2111 nt, Artificial Sequence
  mRNA product Ubqln2_protein of interest example 5_RPS9_A64-C30-histoneSL
  misc_feature (238)..(1899): n is a, c, g, or u
gggagacggagacggccugcaggaccugcucucucagcccucagccgaggccuacgccgagccgagugcgcagccgacgaccgggaggagccgcagccuucaacucugagguacugugauccgcgcugcccgccgggccgccccaguccgcugcugcggcaccuccuucccucgcgcccucuucgcucgccagcgccuucccugugagccugcgucaccgcggccgccaagcuuaccnnnnnnnnnnnnnnnnnnnnnnnnnnnnnnnnnnnnnnnnnnnnnnnnnnnnnnnnnnnnnnnnnnnnnnnnnnnnnnnnnnnnnnnnnnnnnnnnnnnnnnnnnnnnnnnnnnnnnnnnnnnnnnnnnnnnnnnnnnnnnnnnnnnnnnnnnnnnnnnnnnnnnnnnnnnnnnnnnnnnnnnnnnnnnnnnnnnnnnnnnnnnnnnnnnnnnnnnnnnnnnnnnnnnnnnnnnnnnnnnnnnnnnnnnnnnnnnnnnnnnnnnnnnnnnnnnnnnnnnnnnnnnnnnnnnnnnnnnnnnnnnnnnnnnnnnnnnnnnnnnnnnnnnnnnnnnnnnnnnnnnnnnnnnnnnnnnnnnnnnnnnnnnnnnnnnnnnnnnnnnnnnnnnnnnnnnnnnnnnnnnnnnnnnnnnnnnnnnnnnnnnnnnnnnnnnnnnnnnnnnnnnnnnnnnnnnnnnnnnnnnnnnnnnnnnnnnnnnnnnnnnnnnnnnnnnnnnnnnnnnnnnnnnnnnnnnnnnnnnnnnnnnnnnnnnnnnnnnnnnnnnnnnnnnnnnnnnnnnnnnnnnnnnnnnnnnnnnnnnnnnnnnnnnnnnnnnnnnnnnnnnnnnnnnnnnnnnnnnnnnnnnnnnnnnnnnnnnnnnnnnnnnnnnnnnnnnnnnnnnnnnnnnnnnnnnnnnnnnnnnnnnnnnnnnnnnnnnnnnnnnnnnnnnnnnnnnnnnnnnnnnnnnnnnnnnnnnnnnnnnnnnnnnnnnnnnnnnnnnnnnnnnnnnnnnnnnnnnnnnnnnnnnnnnnnnnnnnnnnnnnnnnnnnnnnnnnnnnnnnnnnnnnnnnnnnnnnnnnnnnnnnnnnnnnnnnnnnnnnnnnnnnnnnnnnnnnnnnnnnnnnnnnnnnnnnnnnnnnnnnnnnnnnnnnnnnnnnnnnnnnnnnnnnnnnnnnnnnnnnnnnnnnnnnnnnnnnnnnnnnnnnnnnnnnnnnnnnnnnnnnnnnnnnnnnnnnnnnnnnnnnnnnnnnnnnnnnnnnnnnnnnnnnnnnnnnnnnnnnnnnnnnnnnnnnnnnnnnnnnnnnnnnnnnnnnnnnnnnnnnnnnnnnnnnnnnnnnnnnnnnnnnnnnnnnnnnnnnnnnnnnnnnnnnnnnnnnnnnnnnnnnnnnnnnnnnnnnnnnnnnnnnnnnnnnnnnnnnnnnnnnnnnnnnnnnnnnnnnnnnnnnnnnnnnnnnnnnnnnnnnnnnnnnnnnnnnnnnnnnnnnnnnnnnnnnnnnnnnnnnnnnnnnnnnnnnnnnnnnnnnnnnnnnnnnnnnnnnnnnnnnnnnnnnnnnnnnnnnnnnnnnnnnnnnnnnnnnnnnnnnnnnnnnnnnnnnnnnnnnnnnnnnnnnnnnnnnnnnnnnnnnnnnnnnnnnnnnnnnnnnnnnnnnnnnnnnnnnnnnnnnnnnnnnnnnnnnnnnnnnnnnnnnnnnnnnnnnnnnnnnnnnnnnnnnnnnnnnnnnnnnnnnnnnnnnnnnnnnnnnnnnnnnnnnnnnnnnnnnnnnnnnnnnnnnnnnnnnnnnnnnnnnnnnnnnnnnnnnnnnnnnnnnnnnnnnnnnnnnnnnnnnnnnnnnnnnnnnnnnnnnnnnnnnnnnnnnnnnnnnnnnnnnnnnnnnnnnnnnnnnnnnnnnnnnnnnnnnnnnnnggacuaguguccaccugucccuccugggcugcuggauugucucguuuuccugccaaauaaacaggaucagcgcuuuacagaucuaaaaaaaaaaaaaaaaaaaaaaaaaaaaaaaaaaaaaaaaaaaaaaaaaaaaaaaaaaaaaaaaugcaucccccccccccccccccccccccccccccccaaaggcucuuuucagagccaccagaauu

SEQ ID NO: 369 - RNA, 1957 nt, Artificial Sequence
  mRNA product RPL32_RAV-G(GC)_ALB7_A64-C30-histoneSL
ggggcgcugccuacggagguggcagccaucuccuucucggcaucaagcuuaccauggugccccaggcccuccuguucgucccgcugcugguguucccccucugcuucggcaaguuccccaucuacaccauccccgacaagcuggggccguggagccccaucgacauccaccaccuguccugccccaacaaccucguggucgaggacgagggcugcaccaaccugagcggguucuccuacauggagcugaaggugggcuacaucagcgccaucaagaugaacggguucacgugcaccggcguggucaccgaggcggagaccuacacgaacuucgugggcuacgugaccaccaccuucaagcggaagcacuuccgccccacgccggacgccugccgggccgccuacaacuggaagauggccggggacccccgcuacgaggagucccuccacaaccccuaccccgacuaccacuggcugcggaccgucaagaccaccaaggagagccuggugaucaucuccccgagcguggcggaccucgaccccuacgaccgcucccugcacagccgggucuuccccggcgggaacugcuccggcguggccgugagcuccacguacugcagcaccaaccacgacuacaccaucuggaugcccgagaacccgcgccuggggauguccugcgacaucuucaccaacagccggggcaagcgcgccuccaagggcagcgagacgugcggguucgucgacgagcggggccucuacaagucccugaagggggccugcaagcugaagcucugcggcgugcugggccugcgccucauggacgggaccuggguggcgaugcagaccagcaacgagaccaaguggugcccccccggccagcuggucaaccugcacgacuuccggagcgacgagaucgagcaccucgugguggaggagcuggucaagaagcgcgaggagugccuggacgcccucgaguccaucaugacgaccaagagcguguccuuccggcgccugagccaccuccggaagcuggugcccggguucggcaaggccuacaccaucuucaacaagacccugauggaggccgacgcccacuacaaguccguccgcacguggaacgagaucaucccgagcaaggggugccugcgggugggcggccgcugccacccccacgucaacgggguguucuucaacggcaucauccucgggcccgacggcaacgugcugauccccgagaugcaguccagccugcuccagcagcacauggagcugcuggucuccagcgugaucccgcucaugcacccccuggcggaccccuccaccguguucaagaacggggacgaggccgaggacuucgucgaggugcaccuccccgacgugcacgagcggaucagcggcgucgaccugggccugccgaacugggggaaguacgugcugcucuccgccggcgcccugaccgcccugaugcugaucaucuuccucaugaccugcuggcgccgggugaaccggagcgagcccacgcagcacaaccugcgcgggaccggccgggaggucuccgugaccccgcagagcgggaagaucaucuccagcugggaguccuacaagagcggcggcgagaccgggcugugaggacuagugcaucacauuuaaaagcaucucagccuaccaugagaauaagagaaagaaaaugaagaucaauagcuuauucaucucuuuuucuuuuucguugguguaaagccaacacccugucuaaaaaacauaaauuucuuuaaucauuuugccucuuuucucugugcuucaauuaauaaaaaauggaaagaaccuagaucuaaaaaaaaaaaaaaaaaaaaaaaaaaaaaaaaaaaaaaaaaaaaaaaaaaaaaaaaaaaaaaaaugcaucccccccccccccccccccccccccccccccaaaggcucuuuucagagccaccagaauu

SEQ ID NO: 370 - RNA, 1961 nt, Artificial Sequence
  mRNA product RPL32_RAV-G(GC)_ALB7_A64-C30-histoneSL
gggagaggcgcugccuacggagguggcagccaucuccuucucggcaucaagcuuaccauggugccccaggcccuccuguucgucccgcugcugguguucccccucugcuucggcaaguuccccaucuacaccauccccgacaagcuggggccguggagccccaucgacauccaccaccuguccugccccaacaaccucguggucgaggacgagggcugcaccaaccugagcggguucuccuacauggagcugaaggugggcuacaucagcgccaucaagaugaacggguucacgugcaccggcguggucaccgaggcggagaccuacacgaacuucgugggcuacgugaccaccaccuucaagcggaagcacuuccgccccacgccggacgccugccgggccgccuacaacuggaagauggccggggacccccgcuacgaggagucccuccacaaccccuaccccgacuaccacuggcugcggaccgucaagaccaccaaggagagccuggugaucaucuccccgagcguggcggaccucgaccccuacgaccgcucccugcacagccgggucuuccccggcgggaacugcuccggcguggccgugagcuccacguacugcagcaccaaccacgacuacaccaucuggaugcccgagaacccgcgccuggggauguccugcgacaucuucaccaacagccggggcaagcgcgccuccaagggcagcgagacgugcggguucgucgacgagcggggccucuacaagucccugaagggggccugcaagcugaagcucugcggcgugcugggccugcgccucauggacgggaccuggguggcgaugcagaccagcaacgagaccaaguggugcccccccggccagcuggucaaccugcacgacuuccggagcgacgagaucgagcaccucgugguggaggagcuggucaagaagcgcgaggagugccuggacgcccucgaguccaucaugacgaccaagagcguguccuuccggcgccugagccaccuccggaagcuggugcccggguucggcaaggccuacaccaucuucaacaagacccugauggaggccgacgcccacuacaaguccguccgcacguggaacgagaucaucccgagcaaggggugccugcgggugggcggccgcugccacccccacgucaacgggguguucuucaacggcaucauccucgggcccgacggcaacgugcugauccccgagaugcaguccagccugcuccagcagcacauggagcugcuggucuccagcgugaucccgcucaugcacccccuggcggaccccuccaccguguucaagaacggggacgaggccgaggacuucgucgaggugcaccuccccgacgugcacgagcggaucagcggcgucgaccugggccugccgaacugggggaaguacgugcugcucuccgccggcgcccugaccgcccugaugcugaucaucuuccucaugaccugcuggcgccgggugaaccggagcgagcccacgcagcacaaccugcgcgggaccggccgggaggucuccgugaccccgcagagcgggaagaucaucuccagcugggaguccuacaagagcggcggcgagaccgggcugugaggacuagugcaucacauuuaaaagcaucucagccuaccaugagaauaagagaaagaaaaugaagaucaauagcuuauucaucucuuuuucuuuuucguugguguaaagccaacacccugucuaaaaaacauaaauuucuuuaaucauuuugccucuuuucucugugcuucaauuaauaaaaaauggaaagaaccuagaucuaaaaaaaaaaaaaaaaaaaaaaaaaaaaaaaaaaaaaaaaaaaaaaaaaaaaaaaaaaaaaaaaugcaucccccccccccccccccccccccccccccccaaaggcucuuuucagagccaccagaauu

SEQ ID NO: 371 - RNA, 1898 nt, Artificial Sequence
  mRNA product RPL32_RAV-G(GC)_ALB7_A64
ggggcgcugccuacggagguggcagccaucuccuucucggcaucaagcuuaccauggugccccaggcccuccuguucgucccgcugcugguguucccccucugcuucggcaaguuccccaucuacaccauccccgacaagcuggggccguggagccccaucgacauccaccaccuguccugccccaacaaccucguggucgaggacgagggcugcaccaaccugagcggguucuccuacauggagcugaaggugggcuacaucagcgccaucaagaugaacggguucacgugcaccggcguggucaccgaggcggagaccuacacgaacuucgugggcuacgugaccaccaccuucaagcggaagcacuuccgccccacgccggacgccugccgggccgccuacaacuggaagauggccggggacccccgcuacgaggagucccuccacaaccccuaccccgacuaccacuggcugcggaccgucaagaccaccaaggagagccuggugaucaucuccccgagcguggcggaccucgaccccuacgaccgcucccugcacagccgggucuuccccggcgggaacugcuccggcguggccgugagcuccacguacugcagcaccaaccacgacuacaccaucuggaugcccgagaacccgcgccuggggauguccugcgacaucuucaccaacagccggggcaagcgcgccuccaagggcagcgagacgugcggguucgucgacgagcggggccucuacaagucccugaagggggccugcaagcugaagcucugcggcgugcugggccugcgccucauggacgggaccuggguggcgaugcagaccagcaacgagaccaaguggugcccccccggccagcuggucaaccugcacgacuuccggagcgacgagaucgagcaccucgugguggaggagcuggucaagaagcgcgaggagugccuggacgcccucgaguccaucaugacgaccaagagcguguccuuccggcgccugagccaccuccggaagcuggugcccggguucggcaaggccuacaccaucuucaacaagacccugauggaggccgacgcccacuacaaguccguccgcacguggaacgagaucaucccgagcaaggggugccugcgggugggcggccgcugccacccccacgucaacgggguguucuucaacggcaucauccucgggcccgacggcaacgugcugauccccgagaugcaguccagccugcuccagcagcacauggagcugcuggucuccagcgugaucccgcucaugcacccccuggcggaccccuccaccguguucaagaacggggacgaggccgaggacuucgucgaggugcaccuccccgacgugcacgagcggaucagcggcgucgaccugggccugccgaacugggggaaguacgugcugcucuccgccggcgcccugaccgcccugaugcugaucaucuuccucaugaccugcuggcgccgggugaaccggagcgagcccacgcagcacaaccugcgcgggaccggccgggaggucuccgugaccccgcagagcgggaagaucaucuccagcugggaguccuacaagagcggcggcgagaccgggcugugaggacuagugcaucacauuuaaaagcaucucagccuaccaugagaauaagagaaagaaaaugaagaucaauagcuuauucaucucuuuuucuuuuucguugguguaaagccaacacccugucuaaaaaacauaaauuucuuuaaucauuuugccucuuuucucugugcuucaauuaauaaaaaauggaaagaaccuagaucuaaaaaaaaaaaaaaaaaaaaaaaaaaaaaaaaaaaaaaaaaaaaaaaaaaaaaaaaaaaaaaaagaauu

SEQ ID NO: 372 - RNA, 1902 nt, Artificial Sequence
  mRNA product RPL32_RAV-G(GC)_ALB7_A64
gggagaggcgcugccuacggagguggcagccaucuccuucucggcaucaagcuuaccauggugccccaggcccuccuguucgucccgcugcugguguucccccucugcuucggcaaguuccccaucuacaccauccccgacaagcuggggccguggagccccaucgacauccaccaccuguccugccccaacaaccucguggucgaggacgagggcugcaccaaccugagcggguucuccuacauggagcugaaggugggcuacaucagcgccaucaagaugaacggguucacgugcaccggcguggucaccgaggcggagaccuacacgaacuucgugggcuacgugaccaccaccuucaagcggaagcacuuccgccccacgccggacgccugccgggccgccuacaacuggaagauggccggggacccccgcuacgaggagucccuccacaaccccuaccccgacuaccacuggcugcggaccgucaagaccaccaaggagagccuggugaucaucuccccgagcguggcggaccucgaccccuacgaccgcucccugcacagccgggucuuccccggcgggaacugcuccggcguggccgugagcuccacguacugcagcaccaaccacgacuacaccaucuggaugcccgagaacccgcgccuggggauguccugcgacaucuucaccaacagccggggcaagcgcgccuccaagggcagcgagacgugcggguucgucgacgagcggggccucuacaagucccugaagggggccugcaagcugaagcucugcggcgugcugggccugcgccucauggacgggaccuggguggcgaugcagaccagcaacgagaccaaguggugcccccccggccagcuggucaaccugcacgacuuccggagcgacgagaucgagcaccucgugguggaggagcuggucaagaagcgcgaggagugccuggacgcccucgaguccaucaugacgaccaagagcguguccuuccggcgccugagccaccuccggaagcuggugcccggguucggcaaggccuacaccaucuucaacaagacccugauggaggccgacgcccacuacaaguccguccgcacguggaacgagaucaucccgagcaaggggugccugcgggugggcggccgcugccacccccacgucaacgggguguucuucaacggcaucauccucgggcccgacggcaacgugcugauccccgagaugcaguccagccugcuccagcagcacauggagcugcuggucuccagcgugaucccgcucaugcacccccuggcggaccccuccaccguguucaagaacggggacgaggccgaggacuucgucgaggugcaccuccccgacgugcacgagcggaucagcggcgucgaccugggccugccgaacugggggaaguacgugcugcucuccgccggcgcccugaccgcccugaugcugaucaucuuccucaugaccugcuggcgccgggugaaccggagcgagcccacgcagcacaaccugcgcgggaccggccgggaggucuccgugaccccgcagagcgggaagaucaucuccagcugggaguccuacaagagcggcggcgagaccgggcugugaggacuagugcaucacauuuaaaagcaucucagccuaccaugagaauaagagaaagaaaaugaagaucaauagcuuauucaucucuuuuucuuuuucguugguguaaagccaacacccugucuaaaaaacauaaauuucuuuaaucauuuugccucuuuucucugugcuucaauuaauaaaaaauggaaagaaccuagaucuaaaaaaaaaaaaaaaaaaaaaaaaaaaaaaaaaaaaaaaaaaaaaaaaaaaaaaaaaaaaaaaagaauu

SEQ ID NO: 373 - RNA, 968 nt, Artificial Sequence
  mRNA product RPL32_HsEPO(GC)_ALB7_A64-C30-histoneSL
gggagaggcgcugccuacggagguggcagccaucuccuucucggcaucaagcuuaccaugggcgugcacgagugccccgccuggcuguggcuccugcugagccuccugucccugccgcucgggcugcccguccugggcgcccccccgcggcucaucugcgacagccgcgugcuggagcgguaccugcucgaggcgaaggaggccgagaacaucaccaccgggugcgccgagcacugcucccugaacgagaacaucacggugccggacaccaaggucaacuucuacgccuggaagcgcauggaggugggccagcaggccguggaggucuggcaggggcuggcgcuccugagcgaggccgugcugcggggccaggcccuccuggugaacuccagccagcccugggagccccugcagcuccacgucgacaaggccguguccggccugcgcagccugaccacccuccugcgggcgcugggggcccagaaggaggccaucucccccccggacgccgccagcgcggccccgcuccgcacgaucaccgccgacaccuuccggaagcuguuccgcguguacuccaacuuccugcggggcaagcucaagcuguacaccggggaggccugccgcacgggcgaccggugaggacuagugcaucacauuuaaaagcaucucagccuaccaugagaauaagagaaagaaaaugaagaucaauagcuuauucaucucuuuuucuuuuucguugguguaaagccaacacccugucuaaaaaacauaaauuucuuuaaucauuuugccucuuuucucugugcuucaauuaauaaaaaauggaaagaaccuagaucuaaaaaaaaaaaaaaaaaaaaaaaaaaaaaaaaaaaaaaaaaaaaaaaaaaaaaaaaaaaaaaaaugcaucccccccccccccccccccccccccccccccaaaggcucuuuucagagccaccagaauu

SEQ ID NO: 374 - RNA, 909 nt, Artificial Sequence
  mRNA product RPL32_HsEPO(GC)_ALB7_A64
gggagaggcgcugccuacggagguggcagccaucuccuucucggcaucaagcuuaccaugggcgugcacgagugccccgccuggcuguggcuccugcugagccuccugucccugccgcucgggcugcccguccugggcgcccccccgcggcucaucugcgacagccgcgugcuggagcgguaccugcucgaggcgaaggaggccgagaacaucaccaccgggugcgccgagcacugcucccugaacgagaacaucacggugccggacaccaaggucaacuucuacgccuggaagcgcauggaggugggccagcaggccguggaggucuggcaggggcuggcgcuccugagcgaggccgugcugcggggccaggcccuccuggugaacuccagccagcccugggagccccugcagcuccacgucgacaaggccguguccggccugcgcagccugaccacccuccugcgggcgcugggggcccagaaggaggccaucucccccccggacgccgccagcgcggccccgcuccgcacgaucaccgccgacaccuuccggaagcuguuccgcguguacuccaacuuccugcggggcaagcucaagcuguacaccggggaggccugccgcacgggcgaccggugaggacuagugcaucacauuuaaaagcaucucagccuaccaugagaauaagagaaagaaaaugaagaucaauagcuuauucaucucuuuuucuuuuucguugguguaaagccaacacccugucuaaaaaacauaaauuucuuuaaucauuuugccucuuuucucugugcuucaauuaauaaaaaauggaaagaaccuagaucuaaaaaaaaaaaaaaaaaaaaaaaaaaaaaaaaaaaaaaaaaaaaaaaaaaaaaaaaaaaaaaaagaauu

SEQ ID NO: 375 - RNA, 2039 nt, Artificial Sequence
  mRNA product RPL32_PpLuc(GC)_ALB7_A64-C30-histoneSL
gggagaggcgcugccuacggagguggcagccaucuccuucucggcaucaagcuuaccauggaggacgccaagaacaucaagaagggcccggcgcccuucuacccgcuggaggacgggaccgccggcgagcagcuccacaaggccaugaagcgguacgcccuggugccgggcacgaucgccuucaccgacgcccacaucgaggucgacaucaccuacgcggaguacuucgagaugagcgugcgccuggccgaggccaugaagcgguacggccugaacaccaaccaccggaucguggugugcucggagaacagccugcaguucuucaugccggugcugggcgcccucuucaucggcguggccgucgccccggcgaacgacaucuacaacgagcgggagcugcugaacagcauggggaucagccagccgaccgugguguucgugagcaagaagggccugcagaagauccugaacgugcagaagaagcugcccaucauccagaagaucaucaucauggacagcaagaccgacuaccagggcuuccagucgauguacacguucgugaccagccaccucccgccgggcuucaacgaguacgacuucgucccggagagcuucgaccgggacaagaccaucgcccugaucaugaacagcagcggcagcaccggccugccgaaggggguggcccugccgcaccggaccgccugcgugcgcuucucgcacgcccgggaccccaucuucggcaaccagaucaucccggacaccgccauccugagcguggugccguuccaccacggcuucggcauguucacgacccugggcuaccucaucugcggcuuccgggugguccugauguaccgguucgaggaggagcuguuccugcggagccugcaggacuacaagauccagagcgcgcugcucgugccgacccuguucagcuucuucgccaagagcacccugaucgacaaguacgaccugucgaaccugcacgagaucgccagcgggggcgccccgcugagcaaggaggugggcgaggccguggccaagcgguuccaccucccgggcauccgccagggcuacggccugaccgagaccacgagcgcgauccugaucacccccgagggggacgacaagccgggcgccgugggcaagguggucccguucuucgaggccaaggugguggaccuggacaccggcaagacccugggcgugaaccagcggggcgagcugugcgugcgggggccgaugaucaugagcggcuacgugaacaacccggaggccaccaacgcccucaucgacaaggacggcuggcugcacagcggcgacaucgccuacugggacgaggacgagcacuucuucaucgucgaccggcugaagucgcugaucaaguacaagggcuaccagguggcgccggccgagcuggagagcauccugcuccagcaccccaacaucuucgacgccggcguggccgggcugccggacgacgacgccggcgagcugccggccgcggugguggugcuggagcacggcaagaccaugacggagaaggagaucgucgacuacguggccagccaggugaccaccgccaagaagcugcggggcggcgugguguucguggacgaggucccgaagggccugaccgggaagcucgacgcccggaagauccgcgagauccugaucaaggccaagaagggcggcaagaucgccgugugaggacuagugcaucacauuuaaaagcaucucagccuaccaugagaauaagagaaagaaaaugaagaucaauagcuuauucaucucuuuuucuuuuucguugguguaaagccaacacccugucuaaaaaacauaaauuucuuuaaucauuuugccucuuuucucugugcuucaauuaauaaaaaauggaaagaaccuagaucuaaaaaaaaaaaaaaaaaaaaaaaaaaaaaaaaaaaaaaaaaaaaaaaaaaaaaaaaaaaaaaaaugcaucccccccccccccccccccccccccccccccaaaggcucuuuucagagccaccagaauu

SEQ ID NO: 376 - RNA, 1980 nt, Artificial Sequence
  mRNA product RPL32_PpLuc(GC)_ALB7_A64
gggagaggcgcugccuacggagguggcagccaucuccuucucggcaucaagcuuaccauggaggacgccaagaacaucaagaagggcccggcgcccuucuacccgcuggaggacgggaccgccggcgagcagcuccacaaggccaugaagcgguacgcccuggugccgggcacgaucgccuucaccgacgcccacaucgaggucgacaucaccuacgcggaguacuucgagaugagcgugcgccuggccgaggccaugaagcgguacggccugaacaccaaccaccggaucguggugugcucggagaacagccugcaguucuucaugccggugcugggcgcccucuucaucggcguggccgucgccccggcgaacgacaucuacaacgagcgggagcugcugaacagcauggggaucagccagccgaccgugguguucgugagcaagaagggccugcagaagauccugaacgugcagaagaagcugcccaucauccagaagaucaucaucauggacagcaagaccgacuaccagggcuuccagucgauguacacguucgugaccagccaccucccgccgggcuucaacgaguacgacuucgucccggagagcuucgaccgggacaagaccaucgcccugaucaugaacagcagcggcagcaccggccugccgaaggggguggcccugccgcaccggaccgccugcgugcgcuucucgcacgcccgggaccccaucuucggcaaccagaucaucccggacaccgccauccugagcguggugccguuccaccacggcuucggcauguucacgacccugggcuaccucaucugcggcuuccgggugguccugauguaccgguucgaggaggagcuguuccugcggagccugcaggacuacaagauccagagcgcgcugcucgugccgacccuguucagcuucuucgccaagagcacccugaucgacaaguacgaccugucgaaccugcacgagaucgccagcgggggcgccccgcugagcaaggaggugggcgaggccguggccaagcgguuccaccucccgggcauccgccagggcuacggccugaccgagaccacgagcgcgauccugaucacccccgagggggacgacaagccgggcgccgugggcaagguggucccguucuucgaggccaaggugguggaccuggacaccggcaagacccugggcgugaaccagcggggcgagcugugcgugcgggggccgaugaucaugagcggcuacgugaacaacccggaggccaccaacgcccucaucgacaaggacggcuggcugcacagcggcgacaucgccuacugggacgaggacgagcacuucuucaucgucgaccggcugaagucgcugaucaaguacaagggcuaccagguggcgccggccgagcuggagagcauccugcuccagcaccccaacaucuucgacgccggcguggccgggcugccggacgacgacgccggcgagcugccggccgcggugguggugcuggagcacggcaagaccaugacggagaaggagaucgucgacuacguggccagccaggugaccaccgccaagaagcugcggggcggcgugguguucguggacgaggucccgaagggccugaccgggaagcucgacgcccggaagauccgcgagauccugaucaaggccaagaagggcggcaagaucgccgugugaggacuagugcaucacauuuaaaagcaucucagccuaccaugagaauaagagaaagaaaaugaagaucaauagcuuauucaucucuuuuucuuuuucguugguguaaagccaacacccugucuaaaaaacauaaauuucuuuaaucauuuugccucuuuucucugugcuucaauuaauaaaaaauggaaagaaccuagaucuaaaaaaaaaaaaaaaaaaaaaaaaaaaaaaaaaaaaaaaaaaaaaaaaaaaaaaaaaaaaaaaagaauu

SEQ ID NO: 377 - RNA, 2048 nt, Artificial Sequence
  mRNA product RPL32_protein of interest example 5_ALB7_A64-C30-histoneSL
  misc_feature (58)..(1719): n is a, c, g, or u
gggagaggcgcugccuacggagguggcagccaucuccuucucggcaucaagcuuaccnnnnnnnnnnnnnnnnnnnnnnnnnnnnnnnnnnnnnnnnnnnnnnnnnnnnnnnnnnnnnnnnnnnnnnnnnnnnnnnnnnnnnnnnnnnnnnnnnnnnnnnnnnnnnnnnnnnnnnnnnnnnnnnnnnnnnnnnnnnnnnnnnnnnnnnnnnnnnnnnnnnnnnnnnnnnnnnnnnnnnnnnnnnnnnnnnnnnnnnnnnnnnnnnnnnnnnnnnnnnnnnnnnnnnnnnnnnnnnnnnnnnnnnnnnnnnnnnnnnnnnnnnnnnnnnnnnnnnnnnnnnnnnnnnnnnnnnnnnnnnnnnnnnnnnnnnnnnnnnnnnnnnnnnnnnnnnnnnnnnnnnnnnnnnnnnnnnnnnnnnnnnnnnnnnnnnnnnnnnnnnnnnnnnnnnnnnnnnnnnnnnnnnnnnnnnnnnnnnnnnnnnnnnnnnnnnnnnnnnnnnnnnnnnnnnnnnnnnnnnnnnnnnnnnnnnnnnnnnnnnnnnnnnnnnnnnnnnnnnnnnnnnnnnnnnnnnnnnnnnnnnnnnnnnnnnnnnnnnnnnnnnnnnnnnnnnnnnnnnnnnnnnnnnnnnnnnnnnnnnnnnnnnnnnnnnnnnnnnnnnnnnnnnnnnnnnnnnnnnnnnnnnnnnnnnnnnnnnnnnnnnnnnnnnnnnnnnnnnnnnnnnnnnnnnnnnnnnnnnnnnnnnnnnnnnnnnnnnnnnnnnnnnnnnnnnnnnnnnnnnnnnnnnnnnnnnnnnnnnnnnnnnnnnnnnnnnnnnnnnnnnnnnnnnnnnnnnnnnnnnnnnnnnnnnnnnnnnnnnnnnnnnnnnnnnnnnnnnnnnnnnnnnnnnnnnnnnnnnnnnnnnnnnnnnnnnnnnnnnnnnnnnnnnnnnnnnnnnnnnnnnnnnnnnnnnnnnnnnnnnnnnnnnnnnnnnnnnnnnnnnnnnnnnnnnnnnnnnnnnnnnnnnnnnnnnnnnnnnnnnnnnnnnnnnnnnnnnnnnnnnnnnnnnnnnnnnnnnnnnnnnnnnnnnnnnnnnnnnnnnnnnnnnnnnnnnnnnnnnnnnnnnnnnnnnnnnnnnnnnnnnnnnnnnnnnnnnnnnnnnnnnnnnnnnnnnnnnnnnnnnnnnnnnnnnnnnnnnnnnnnnnnnnnnnnnnnnnnnnnnnnnnnnnnnnnnnnnnnnnnnnnnnnnnnnnnnnnnnnnnnnnnnnnnnnnnnnnnnnnnnnnnnnnnnnnnnnnnnnnnnnnnnnnnnnnnnnnnnnnnnnnnnnnnnnnnnnnnnnnnnnnnnnnnnnnnnnnnnnnnnnnnnnnnnnnnnnnnnnnnnnnnnnnnnnnnnnnnnnnnnnnnnnnnnnnnnnnnnnnnnnnnnnnnnnnnnnnnnnnnnnnnnnnnnnnnnnnnnnnnnnnnnnnnnnnnnnnnnnnnnnnnnnnnnnnnnnnnnnnnnnnnnnnnnnnnnnnnnnnnnnnnnnnnnnnnnnnnnnnnnnnnnnnnnnnnnnnnnnnnnnnnnnnnnnnnnnnnnnnnnnnnnnnnnnnnnnnnnnnnnnnnnnnnnnnnnnnnnnnnnnnnnnnnnnnnnnnnnnnnnnnnnnnnnnnnnnnnnnnnnnnnnnnnnnnnnnnnnnnnnnnnnnnnnnnnnnnnnnnnnnnnnnnnnnnnnnnnnnnnnnnnnnnnnnnnnnnnnnnnnggacuagugcaucacauuuaaaagcaucucagccuaccaugagaauaagagaaagaaaaugaagaucaauagcuuauucaucucuuuuucuuuuucguugguguaaagccaacacccugucuaaaaaacauaaauuucuuuaaucauuuugccucuuuucucugugcuucaauuaauaaaaaauggaaagaaccuagaucuaaaaaaaaaaaaaaaaaaaaaaaaaaaaaaaaaaaaaaaaaaaaaaaaaaaaaaaaaaaaaaaaugcaucccccccccccccccccccccccccccccccaaaggcucuuuucagagccaccagaauu

SEQ ID NO: 378 - protein, 8 aa, Artificial Sequence
  artificial peptide sequence
DYKDDDDK

SEQ ID NO: 379 - protein, 10 aa, Artificial Sequence
  artificial peptide sequence
EQKLISEEDL

SEQ ID NO: 380 - protein, 9 aa, Artificial Sequence
  artificial peptide sequence
YPYDVPDYA

SEQ ID NO: 381 - protein, 7 aa, Artificial Sequence
  artificial peptide sequence
PKKKRRV

SEQ ID NO: 382 - protein, 16 aa, Artificial Sequence
  artificial peptide sequence
KRPAATKKAGQAKKKK

SEQ ID NO: 383 - protein, 5 aa, Artificial Sequence
  artificial peptide sequence
GGGGS

SEQ ID NO: 384 - protein, 4 aa, Artificial Sequence
  artificial peptide sequence
  misc_feature (2)..(4): Xaa can be any naturally occurring amino acid
KXXX
